United States Patent Application Publication US 2008/0274467 A1 - sequence listing, part 2

SEQ ID NO: 108 - DNA, 53916 bp, Mus musculus
  misc_feature (1)...(53916): n = A,T,C or G
gctctgtctggacaggtccagacgactgacaccattaacactttgtcagcctcagtgactacagtcatagataaacaggcctcagctaatgtcaagatacagagaggtctcatgctggttaatcaactcatagatcttgtccagatacaactagatgtattatgacaaataactcagctgggatgtgaacaaaagtttccggaattgtgtgttatttccattcagtatgttaaatttactagggcagctaatttgtcaaaaagtctttttcagtatatgttacagaattggatggctgaatttgaacagatccttcgggaattgagacttcaggtcaactccacgcgcttggacctgtccctgaccaaaggattacccaattggatctcctcagcattttctttctttaaaaaatgggtgggattaatattatttggagatacactttgctgtggattagtgttgcttctttgattggtctgtaagcttaaggcccaaactaggagagacaaggtggttattgcccaggcgcttgcaggactagaacatggagcttcccctgatatatctatgcttaggcaataggtcgctggccactcagctcttacatctcacgaggctagactcattgcacgggatggagtgagtgtgcttcagcagcccgagagagttgcacggctaagcactgcaatggaaaggctctgcggcatatatgagcctattctagggagacatgtcatctttcatgaaggttcagtgtcctagttcccttcccccaggcaaaacgacacgggagcaggtcagggttgctctgggtaaaagcctgtgagcctaagaactaatcctgtacatggctcctttacctacacactggggatttgacctctatctccactctcattaatatgggtggcctatttgctcttattaaaaggatagggggagatgttgggagccgcgcccacattcgccgttacaagatggcgctgacagctgtgttctaagtggtaaacaaataatctgcgcatgtgccaagggtatcttatgactacttgtgctctgccttccccgtgacgtcaactcggccgatgggctgcagccaatcaaggagtgacacgtccgaggcgaaggagaattctccttaaaaagggacggagtttcgttttctctctctcttgcttcttgctctcttgcttcttgcactctgctcctgaagatgtaagaataaagctttgccgtagaagattctggtctgtggtgttcttcctggccggtcgtgagaacgcgtctaataacaacagggttgataaggacttcccatttagggctgggcactcggtagtcacttatcctcagcacttgcccccgttgtgaggctccactatttactgcagagagaggcttccctggataaggtgaagagcagcagtaatctatagtaatctatgtgtataagcacagatattaagtcatggcagcttggtatgttatttagcaaaacaacagtgggttcctcactagggcctggacttcctgagccgtgtggatttgaggcaagagtagagtatggctggctggtttttaaggtcaacttgacacaagctagagtcatcttagaggagagtctgttgaggaaatgggagcctcagtcgagaaaatgcctctagattggaggtagaggcaggtggttttctgagttcgaggtcagccaggtccacaaagtgagttccaggacagccggagctacacagagaaaccctgtctcgaaaaaacaaaacaaaacaaaacaaaacaaaacaaaacaaaaaacaacaacaacaaaagattggggcagagatgtgcctatatggcatttccttaattagtgattgatgtcgtgatacacagtacactcctgccctggtagccctgggtgctataagaaggcaggatgagcaagccgtgaggtacgagccggtcataggcactcctctactctgtgcatcagctcctgccaccaggttcctgccctacttgagttactgccctcgcttttctaggtgatgatggtcttttacctggatgtgtgagtgaaataaacacttttctccactgtttgcctttggtcatggtgtttcatcacagcaatggaaaccgtaagatgctaccagatgtgaattcccttctgagaatctggccaaagattccattagaaagtggttagttttcccccacgacagtcgggccgctattgcaccagccagtgcatctgcagcagtggtactcaccacgcgataatgccaaggagaggatccagcttaatagcctgcatcttttaattggggaattggtatcccggttgttattggaaagtgtgttggtcaattttgatgtgtgtgtctgggtgggggggtggctttaattctcttgcttagtattcttctattatggattattctatcctggggccttctggatggttttgaacattttttttctctccattctggaaattccttcaagtgtcttctgcagaactgggttagtgggtttaggttcgttcagtttatttttcatcacggcaagtttcttattttcccttctgtaatgtgaagtggaaacttaagggttctttgggaagtcaattgtgttggaggatgttctgttagggcaaacactcgaaggactgtcctgaagcagatgcaagtgaaaggatgttttttggtttggtttggttttggttttagggttggttttgttgttgttcttgttgttgattttgttgttgttgttgttgttctttttgtttttcgagacaatgtttccctatgtagccctggctgtcctggaactcactttgtagaccaggctggcctggaactcagagatccgcctgcctctctctgcctcccaagttctgggattaaaggcgtgtgccaccacacccggcttaggatgttttgttaaagcaaacacgtgaagaaatgtttcactgaagcggacacaggagaaaggctgttctgctaaagcaagcacgtgaaaggacacgtgatgaaggattcttcgctaatgacacgcatatattggtccacctgacaatgaaaagttgagctgcatttgtcaggactccaaagagagaaacacaccaaaaatcttttagtgtgtgttgtggcttcttgtggcttccttggacttagattggttggcaaagtgacgtcacctgcgacagacttagacgagctatttggaggtggaaatgggattgaacaggcagtgaaggaggctgagcttggctcacatagctaaatgcttgttggttttgtgtcttcgttaatcttcacttccctgcgggagaactttttctgatgtccctcctggtcccgccttgtccctcctgctgacacctgccaatttggctgaggcctggctgtctctgctgggcagtgttaccactgctggttcatgtttgctctcagaactctatggaactggactgctggtgtatctgtgaggtgtttgccagtggattgagctgccgctgcctgataacctgtggactgaactattgccagacaacacagacgggagtcgctccaaagaacctttctaaacaggtccacttcccccgtatcctttctttcccactacctctggtaggtggtgagctacaagggaggttaaagccttaaagtgggctttaaaaaaattaaagttgcaataacggcagatagttttgttgttacctttcagaacttgaaacacatcattctaagcgctgaggcgtttgaagtttcagagtccctgtcccaatggcctgtcttagtgatgtgacctgatgtttctgacttcatgctttcaatagagtgtctttgttctctatgtgtggcatttgatttcagggtgctaaggggagcttttttcctggtcctgtctgcctggtatctatccctaggacattttcccagcttggggaaactattaagattattttgactatttttttttaatgtgtcttttgagcaagattctttcttctatgcccataactcatatatttagtctttttggagtatcagaaacatcttagattcttactgttatttttattttccttttgtccttgttagatggctctgcatctccactgacttcaaactcaggaactatctcgtctccttaacccctctgttgctgcgattccctacatagtcccctagcatttcagagttttaggcctggtctctctttgctgagctcctctttcatgtcatcggttgcctccttcatcacagtctgggaacatctgtatccttacttgagttctctggaatttcctataactcttttgtttgggggtggggggtgtttttttttttttttttggtttttggtttttcgagacagggtttctctgtgtagccctggctgtcctggaactcactctgtagaccaggctggcctcaaactcagaaatccacctgcctctgcctcccaagtgctgggattaaaggtgtgcaccaccacgcccaactcctataactcttacctctgagccatctcgccagccccacacttttttaaaaaaataaaataaaaagaggaaggataaaaatgagagctgatatgctggagagatggctcagtggttaagagtactggctgctcttccgaaggtcctgagttcaattcccagcaaccacatggtggctcataaccatctgtagtgggatccgatgccctcttctggtgtgtctgaagacagttacagtgtactcatataaataaaataaataattctttaaatacagctatagtgtactcatatatatataaaataaataaatctttaaaaaaaaaaagaatgagagaggacatagcaatatgaggggagagatgaggcgtggcctccatgagcagggtcctaacagacagatggatggacagacagagaaacagaagcaaaactagctggaaacatctgtgcaggagtggagacggaacaagacaaaagagggcacaaagataggcaaggtgctcgacgtgcggcacacctgggctggcctgacgagcggagcttccagcttccccaccccacccctaactcccaccacccccaccctcactctagttggttttagtgctcctccgtgacagaggggagaacaggaggccctggtctctggattcaggggtatgaggcagtgttcttagccccttcttggttctgtgggactcatgctatccacagtaggatttccagttcctgccaagttttccgggtgtgatagcacacacctttagtcccaagactctagaggcagaggcaagtggatatctgagagtttgaggcagcttggtctagagagtgagttcaaggatagccagggttacacagagaaaccctgtctccaaaaaaaaaaaagtttctcactacaatagcagactacggaaaagggtacaggttttgcccttggcagagggaacaagctacgcagagacagcctgtaagaggctggagaacttgcaagcttgagatgcagaggggaaggtcctgtgtggagataacacagcaaacccacatgaccccattatatttatagctacttcttattaaattttttacttattttatgtgtgtgtgcatgtagatatgtgtgtgagattttctgtgtatgtgtgcatgtgtatatgtgtgtgtgtgtgtgtgtgtgtgattgtgtgtgtatgtgtgtgtttgtgtgcgcatgaaggtagcagtcagataatagtgttctgcagttggttctgtcctatccccatgggtcccaaaggctaaactcaacctcaggcttagaaatgctccactgagccatcttcatggccctgacagttcttgctaatatttttcaatgctgttagatgttgtatcaagtttcagacccatctcagctttcctgaaagtgattcggccctgctcctgttagtgtttactgtatgccacttctgtgtgccgccattcctgggaaggtacagatgccaccaaagttcagctttgtgggccagtgagttgtatggggacctacttacagaagcagaagtgactcaaaagacagccacatcacttaagcacacccaagcactgggtgacagctcacaaagctggaaatctggaactctcgcaatacagcatgcaggcagctcaggagtgtcctttgcaggtagctctgctagtctctgcctcttctaggcagctctgctgatctcatcctcttctacacggctcactggtctgagagtaactcttggctctctttactgcttatatactacattgggatggagaagggcagggcttagtagatctggtcagtttcaggaacttccttagcaatctgagttgtttccttcctgagcttaacaaacttccctgtaagatggactgtctcagctccctttagaacaacctgttgcgtctgctccttgtgtcttgaagagcttctccatttggtgggaaactttaaactggaggaaatggctgtacaacagccatgggctatcatggcaggcctggccccctcagaccctcgaagttctgcagtgctgatcacatagtacacagtgcttcttgcacagtcctgcagtgcctatcccactctccccacaatatgaaaacaggtcaagagtcactgttcccaaggtcacaccatggacaggacgtggacctagctgaaccactcaagacactcctttccaatacaggcatccactcacccttgcttttaatgcagctttgctcattgcctgtaggcagctgtccatacccattcacaagccccatgtgtgtgtctcctccctgcttccaggtgttcctctgatagatgcctgcctaattattagttcagttcccaatggatgggcatctcggttatttccagccctctacaattgtatctgtttgccgaccaaattttagctcctgttcatgactccaccagtaaaagaagttcctgctggatactggaccgccccccgccctcccccccccaatacccaaacaacaacaaaatcagaacaactttaaaatctgaattctcctcccaggagactgtcctgaggaccagcagaggccattttcagttcagagagcagttgaaggctctaaggatgggtgggtgtgggaagagctctttacagcttagctcactgcccacttagatcctacaaatcccacagacaccttctattccaagatggttggaccagttcctgcccagagccgctgaactcacactcccgcatcctaaaatgcaccctcgttctcttatagctaactcttttctctttttcattagaggcctttccagataggattgtcccaagccatttcaaccccatccctggacttgattttgctttgtttttgcaatactggcaaggaacccagggcctcatgcgtgttaggtaagccagcaccacactcagcgagggggggattgtttcagcttacagctgacagtccatcacgaagagaagggaaggcaggaacctggaggcaggggctgatgcagaggtcatgttggggtgccacttaccggcttgctccccatggtttgctcagcctgcttttattatagcctccaggatcacgtgacgccgcccacaatggactgacctcccacatcagtcaccaatcaagaaaatgtccccacaggcttgctataggacagtctaatagaggcagcttctctactgaagctgtcagatggccgtagtttgtgtgaagtttgcaaaatcagcactgttgctttgaatcttaaactctgactttagtaagggtctttaaatgtcttcatctccctcgtagcccaccacccaccagaggtagtgggaaagaaagggtcttaggatacgagggacatgtacctgcttagaagttgttctttggagcaaatctcttctgcgttgtcaggaaatctgcagttcaggtcacaggatttagcagcagcagctcgatccatttgtgagtactttacaaatatatcagcagggctggagagatggctcagcgggtaagagcaccgactgctctcccgaaggtcctgagttcaattcccagcaaccacatggtagctcacaaccatctgtaatgggatctgatgctctcttctagtgtgtctaaagacagctacagtgtacttacatataataataaatcttttttttttaaagaagagtatatcagtagtctaatttagtagtgtcagaatagcaaactcgaatcagcagtggtggcatgacctagtaggtcaggcctcagccaaatcagcaagagtcagcaggagtgaccaggaccaacagggacgctcagagaagttctttgccatgcttctctcaatgaagtgaagatcagccaagatgtaagaccaacgatgctttgtaaagctagctctgcaagcaagcccccgtcactgtccactgagccctatttatacttcctccgaacaccttgtgtcctccatgggcttttgtctcgccatgtgtcttgcctcactacgcaagtgtcttaagattctacacgagtctgtatcagctgacatcgctctgccaatcagcccaagtctgcaaaagtggaaaaaaagccacaagaaccccaccagaagttttttgctgcgattctctctatagagtcacgacaaaccaagctcaactgtgtgatgtaagaggaaaccaatacatgagtgtcattaactaaaaacccttcattacgtccacttacatgtttttttgttttttttgggttttttttttgttgttgttgttgttgtttttcgagacagggtttctctgtatagccctggctgtcctggaactcactctgtagaccaggctggccttgaactcagaaatccgcctgcctctgcctcccaagtgctgggattacaggcatctgccaccactgcctggcgtccacttacatgtttgctttaagcaaagtatcctttcatctatgtctgcttcagagaaatgttccttcatgtgtttaacccagcagaacaccatctgacacaaacaactttctaaagaaaccataaatttctacttcacagcactgcccattattatcccccacggaatgttctccctgctaatatgtacaatatacttcttacatatattatctggttccatatttagactatccttccagaaaggcagaaatcttgattgggtcctgacatgtctttttttttttttttttccttaagtgacaaggtctttgttgctcaggcaggccctgaactcccagtacctgggcttacagatgcataaagctatgcccagctctcaaatgcttaaaatgacatagggcgtgcggtaggtgctggataaagacttactagatgggtgagtaaatgaatgaggatcttaataacccagccacatcctccagggttcgcagactgtgccttcaaggaaaataacctgttaaagaatatttctgtcccctgagtatgcgcacaggcctgttgcagatgcagagcatccagcactcgggacctggggccaggttgaagctaggtttgttgaaggtgctgtgagttcaggattgccctggatcactctgtccaagagatgcctacaaccctttaccacagaagatccaccccattctaggggatccgcccacttctaaagatcctcccaccctggctgtcccgcctacatctcctgaggctccacctcaccagggaggttcctcccgcagcttgccccggaagctccgccccatcctcgaggctctgttcccgcccacttcccctgaggctccgccccactagggaggttctttcagcccatttctccggaagccttttcctgaagactccgcctcaatccgcctaccccgaggcccctcccactttccttgaggctccgcccacccaggaggcctcaccggctccttctcggaggccccgccccacccaggatgtcccgcctactcccgtgaaactccgcccccggcaccgcccgcctgtcagcgggcagctgggctaggctccgaccttgtagcggcgcagcgccggctccgagcaaagcggtgcccagagcgggctcggtgagaggcaggatcctgtgtccccgcgtcccggccacggtgtcaccctctgacgactcacctggtggcaggtaagggccgcccccagctctgcggagctcgcaacgggaattcggctgttttttgacccttctgcgacgcggtcttgtaggtaccttgcggggagagcgtttggaggagaccctggaggcctgtggcccggcatggagctggtggcgacctctgagggctgcgagcgccaggcctagcctgggccaagccttcccagctatcaagcgggcctgtgcggtcccagagggctcctcctcgcctgcctgagttaattgagatagctgcaagcgtggcggacacttccctgccctctgccccaccccctgaagatgagtggcctccatgaccctgctgcagatggcgtggggacaggtgtcaggacccccttgtttgccaccaggttccctgaggccacctggcgtcgcccgatggagtgccagtcacagcagtgggatgtggtggcccaagcaagagcgggagtcaggatggagccatgtggacccagcctgggtgtgtcatgttctctagagaaaccccctacacaaacacacacagcaacaaggcagttagggactgctgagagcagcaccgaccggcctctccagggctgggccctcggaatgacaagcctgcagagtgaggggtgaatgggagtcacttgagccacccgaggcaggacctttctctgcagatcctaattagcctgggcacgcctttcctctcctcctcctcctcctcctcctnnnnnnnnnnnnnnnnnnnnnnnnnnnnnnnnnnnnnnnncctcctcctcctcctcctcctcctcctcctcctccagcagagggtaaagtgtggggtttcccttgagctgtaagaggcatggggactgttagcctcccagggctctgggtcacagagctgggaggtacagggaccagggaagacccaagacaggtagctgttgtgattgtaatgataacaacttctctcctggctgtttctgattactcttgcttacaatggacggctgtgggtactccaagcagtaccccctccggggaagggggtgggaaagccttctcaaaaaaacccctgtgcttgggatgtagctcagtggaagagttcttacctagcaggagcaaggtcccgagttctaaccccagcaccaatataaaacacaacccagtggggcaggggtcacttgccagtcccatgccttgcctaagcatttgagccaagagaacttgccttgtcttcctggatcctactggcccctgagcaaggcctgcaccgcctctagccaccagcttgcccttgtctcttgggccattcgtatcacctgtgtgcctacagtgcgtcctccaattccacctagctgtgcgtcctcagagtccgggcatatttgggataggcatgtgcctcctgagtggcctttctgcccttggcttttagcctgacagtgtgattgtggccttcccaccatactctgcttggtacttaacgagagtaacctgccaccccaccctcgccccaggattaaaacctgccctgacctgagttggattctgatccgtggatgtttgaatagatggatggcgctgggggtggggtggagggggcagggcacctaggcactataggtgctctgcctcaaatgacccctagccaagcctctctacctcccttcccggcttcatttttttgtcacctgcaaaagtgcttcagctagtctctgatgttagcatctgatgttagcatctggagtgttcttttccagaggacatgggcacttggggctcctaggtgtgggtgggcgcctggctaacttgggctgttggggttgcaggaaggaatcctccatgactgacagtcaaagggagggaggctggatagcggttccagcctgcaggctggcttcccatttctggttgatccttctgtctcgctcctgagccttggcccccttcctagggggcccatgaacccctggtgcccaccccaggaaggcagtagtcgggtacctggcagacctagtgaagccagcacttgcttggcaggaggcctgcggtggcgctaggccaggagcttccctctcgggctccaagtggagttcacccactcacactccctgaggcgtctgcattgcagcagactgagcccaggagctgcattggcagctcggacctagcagggatggaagggctgagggagcctgcctgtctcactccttctctctgccctgaccctacttggccctggctccctttggaaaggcagatgctgactaatcaggctgtagctctgacatacactcaggtctgcctggaagtgctggagtgacagaaaaattaaaaagaaaataaaacaacccccccccccaggctctggacccttcatgccatctccgcgcctcagaccctttcttggcatgggggggtggtggggcatgtccacctggaagagactgtcatcatgtatagagccgtggagcccagactttggagctcaatctagctgtgtgacatggagcagatcatctgacctctctgtgcctcaagtgtctaaaccataaaattagaatttatttcatgaaagtctcacggtgccacgctcatgtgcccatcagaggatgcaggctcttaccagtgtcacctctgcttcttgcctgagcaacgtcaactattttccttaaaggagtacctcctgtcagtgttggttgtatccagatatagtgttgaccgctctgccagttcaccggccgtgggatgctgggtaaattcttccctaggccacattttcgccattggctatgtggcactgatgacactgcaaacctcgcagagtcatcttgaggataatcttaacacatgaaaagcaggcagtgtggggcttggcgccttccataagcacgcaatgcaggtatgcagtgcgcacaggtggaggaccctggtgctggagtccttcacacaggggcttcttttggtttgggccagtgttggctgagtgaaagagctggtgactttgtcttccggtgcctcagtttctccagatgtaaatggggacacagacaaactgacctcatgtaaaaggttagatccctcgacagttcaaagtcagtccccatggtgtggccccccagagcaacaggggaaaggtgtccctcaggactgactgtcctgtcccttagtgccttcctgtaccatagggctcagagtgttgcccgctttattgatagggcaccgacactgttgtttcctctgaggaagatcagatctgatcaggagtcagtcagtgcttgggtccgcctcagccagatcctaaacctaccctaaacaagccccacctccagccacaagatccacaccttgctcacctccctcaagctctgggctctcccaggccctgggagggggagggcgtgtgggaggggcttcagtggcttggacagcaaaagcaagaaaaaaaacaaggtccagagctaggtgtgagggcaaacctaggctggatctaagagactctggaaacttccgagcagacacaaaggtctctgggttgccatggaacccgagagtgtgaaaggtgagttgagatatagtgtttgccgttgctatcagcagcagtcagcgtgtgccaggtgtgccgggcctgatagctaggcactgaacttcactgccaccctgagcaaccggaacagtgaagactccagggccatcttttgagctctgctaatctcagcgtcacctcctcaagtggtggcaaagtcctccatgcgatccccatcgccctgcccccatttcccagtgcctgtgctctcactgtctcagggtacactcctgcctcaggcccaggccttctcttccccctgtccaaaatgctttccccagtgtgtccttgggggcgattctttcctctctgtctctgtttgtctctctgtctctctcccttcctcatatgagagagagagagagagagagagagagagagagtgtgtgtgtgtgtgtataggacattaaacccagggcctcgacttaaccctatactatctcttaaatttgtcttaaatttgacattggtactcactaagttgcccaggctggccctgagcttgccagcctcctgccttccccagtagctagaattccaggcctcgctccctcagctcttccgagtcttcttcgcatgtctcctccccttctatccccctttctcatttcacaggcttcattcttagcatcaggaccagtcctctctttctttttcttatttatttatttatttatttattatatgtaagtacactgtagctgtcttcagactctccagaagagggagtcacatctcattacggatggttgtgagccaccatgtggttgctggggtttgaactcaggacctttggaagagcagtcagtgctcttacccattgagccacctctctatcccctctcttttaagattgctttttattttatgtgtctgaatttcttgcctacctggatacctggatgtgtgtgcaccacatgcattcagtggccaagagggccacaggaggatgtcaaagcccctggaattggcattatagaatgtttagttaccatgtgggtattgggaatcaaagctgggtcctttgggagagcggctggtgcccttaaccattgagttgtttgcccagccccgggtcagccccttttgaatctccctcctgtagagggaggccatctttatagaagcagagatctttgtgctctatgctcactgtttcttgtttctctttgttgtctgctgctgccactgtgtgtgttttgataacaattatttttatttatgggtgtgtgtgtgtgtgtctgcatgagtttatgtgtagcacattgagcaggagcctgtggcgtccagagggcatcagatcccagggagggggagttatacgtgatgctgagccatctctgtagccctctgccttatgttttgagacagggtctctcactgaacgtggtgctcagcgactctggctagtcagtgaactccagatccacctgtctctgacacaccccaccctctgggactcggagtgtctggctggcttctgtggcctgcctctgctgggattaaaggcctgcgccaccacacccggcccattttcttttttttaaaaaaagtgtctttctctctctgttgcccaggctaaccccagcctcaaactcggtgcagtcctccttgcttcagcttctggaggggagtgtggggatcagaagcccgattcaccacacctgcctcaagttttgttcattgctaaatgccaaacgcaaggaacagagtcgcgcctacagcacatgtgaaataaacatcccttgcatggagaagaccctccaccatcccgggacatcactcattaccagactccctcggggtcatgcagccataggagtcccctcgccctgatgctttctttctgatgcccccacaggtgtggccctgcccagctgtcagtgatggccttgccccggtgagccaaagcctgcccctctcacccgccggccaccagccagcaggatgaggctgtggaaggcggtagtagtgacgctggccttcgtgagcacggacgtcggggtgaccacggccatctacgccttcagccacctggaccgtagcctgctggaggacatccgacactttaacatcttcgactcggtgctggacctctgggctgcctgcctgtaccgcagctgcctgctgctgggggctaccataggcgtggccaagaacagcgctctggggccaaggcgcctgcgggcttcgtggctcgtcatcaccctcgtgtgcctctttgtgggcatctatgccatggccaaactgctactcttctcagaagtgcgcaggcccatccgggacccatggttctgggcgctcttcgtgtggacctacatctcgctggctgcctccttcctgctgtgggggctgctggccactgtgcggccggacgcagaggccctggagccagggaatgagggcttccacggggagggtggggcccctgctgagcaggcatcgggagccacactacagaagctgttgtcctacacaaagcctgacgtggccttcctagtagctgcctcctttttcctcatcgtagcagctctgggtaagtggggccttgggtctgaccacactgagccttggtctccagggatgtacttgcagggtgcctagcaacctcttccctctcaaacgggtagccggtagccgttcacttaggtggtttacactgctgggagacccagaaggaatgggtatggtgtcttaccccccttgtcctctcagcatttgagagactgaggcaggaggattgttgagagtgtggtctgcttgggcaaagagaaggcctttgtctcaaaaatatagagagaggagctagagagatggctcagaggttaagaccactggctgcttttccagaggtcctgagttcaattcccagcaaccacatggtggctcacaaccatcagtaattagatccaatgccctcttctggtgtgtctgaagacagccaccgtgtactcctgcataagataaataattctctttttaaaaaatacaaagaagccaggcagtggcggcacacgcctttaatcccagtacttgggaggcagaggcaggtggatttctgagttcgaggccagcctggtctacagagtgagttccaggacagccagggctacacagaggaaccctgtctccaagaacaaaacaaaacaaaacaaaacaaagcaaagaagatgtggaaaggcaaaagtttagttaattctacccgattgcccgcattgttctggcccagggctaaccacagaaggttatatagacttctatgtgggcaggagatccagtcattccctcatctcctgtgtacacacacatatgtgttcgtgttcttgtgtgtacgcagaggtcagcgtgtgtatcatcctcaatggcccccaccttattattgagacagaatcgctctgaacctggaactcattgattgactagaggagatgtcagtcaccctcaggatcctcctatctccacctcccctgcagtgggattatagccaccacgctcagcctttgcatgctgagagccatcttcccaggcgagccctcgtcctttctttttggtgtttggcggcatagctcccaggacatcacttctcacctgtgcatactggttggattcttgtttgttttgctaatgtctcctggacatcccaacccaacattattttctttggctgcatagaattctactgtgtgtggtagcatatatctttccccatctgtctcctgttgcatgagcttgtctcatgtgactgaacagagctgaagggtgaagttcgtcttggtttgaaagttaggtgtgtggtgctataggtctgcttctctcccgaagcatgggcaggaaggtggtacaggaaggttgggactccatagctcctcccactggcagggcctggggtctcaatgagctgtgtgacctggggtaagtctatcaacctttctgaaccatacctctctcttgtggggaatggcaagcacagggcttagtacatcatggtgggtgtccaagaattcacagggaccaaccctgggggcaatgacatagtcagagtagtctcaaagaaggccagtgaacctgagctggctctaccccaatccctccctcactgcctcactgcctcacccccgaccccgagtcccctcagttcctccttttagagtctgtgtgaaccaaaaaataaaaaataaaaataaaaaaattttagccgggcatggtggcacatgcctttaatcccagcacttgggaggcagaggcaggcggatttctgagttcgaggccagcctggtctacaaagtgagttccaggacagccagagccatacagagaaaccctgtctcgaaaaaaccaaaaaataaaaaaaaataaataaataaaaatagagtctgtgtgatatgaggcagctactcagcctctgcttgttggtctctgtgtctgtaaagcaggagtacagtccccacttcgatcagctgtgttgctgtgacagagtgcccgggataacagcttgaaggggagaaaggttagcttggctggtgtaatccggttccagctatggtcgtctgagttcatggctatggaacctatagtgaactagaacatcacggccagagtgtagtggaacagggctgctcacttgatggtggccaggaagaagacagacagatgaagggctgggggaagagaaaggcacaccggccatgactgagcccagcctccaagtcccaggagggttgcgagcctccatcacacgagtttttgtggggatataaaaactaaactatagtccccgtggtattaagggacagggagtgggccaataagctaagaagataaaatgcctcagatgaatcttggcacggggagcacattagctttgagtggctgtgaagtccactcaaagccccaggtccctgcttgggtagccaccttggattcatctgactggcctttctttgcccctcagccattgtgttggtgacatttccaggtctgactcaccccgggtgctgatctctagagccagatgtcactccatgaccttgtccctatgcctgtggtggccccgtgttgctgtggcatgctcagggggacacaggtgtactacagtgcctctgagttctggcagccttcagggttacatcaggccaagggctcagtctgagtcagactctggagcactgatgcccggccagctaaggctcagtttctcaccctgcaggggcatggcgctgtgagtgctaagagagacaagcagggcaccgggagcaggtgcagagccagtgtgaggtgccatctctacagaccagactggccttgaactcacagagctggagatcctcctgcctctgcctcccgaatgctgagattaaaggtgccctgggcatcagtactgtctttcatttcattctttttacttttatttcctgagatagggtctttttatatagccccggctggcccggaaagattcctttattgttttacaatcacattttacatttatttatttatttgtgggaggggctggttgagcagatgctgtgccctgtaagtggtattcttttttttttttttttttttttttttggtttttcgagacagggtttctctgtgtagccttggctgtcctggaactcactttgtagactaggctggcctcaaactcagaaatccgcctgcctctacctcccaagtgctaggactaaaggcgtgcgccaccacacccacccggcttgtaagtggcattctgaggacaacttaaaagagtcggtcagtcagtcctctccttccaccatgtaggctctggctgtcaaacttggtggaaagagctttaccccctgagccatctcaccagctcagcattctcttctgtttgttttccatttttatgtttgtgtgcgcatgcgtgtggcacctgtgtggttgtaagtagaggccagatgctgacgttagctgccttcgatcaccctccaccttaccttttgagacaaggtctctctctgaacctgaagctcattcattcagctgggttggctggcgagtgccagtcccaggacacatgccaccatgctgagctgttcacgtgggtgccgggggtctgaactcaaacttgcacggcaagccctgtaccagtttcttagctcctggttatttgtggttttctctttcagacaggacctcaggtaaccctggctggccttgaactcctgatctccttgcctccaccccccaagtgagattataagcatgtgctatactgcacctggcttgctatttgggacagggtcttcttagatcactgaggctggccccctcaccttgaaatgctcccgcctcacctcccaagcagtgtaaagtaggattcttgcattgggtttcttggcatctcgactgtgtagaaatgtgggcaagctcagagctccagtctcctcctctgtggaaagaagtcatttccacaaatagcaagaacaaaaataccaagcccgtaagaacacagggtgacatttgggacttggaggaaataaaggaatagatgtctgtggtaaggtgtgctctaggcagctgtgcacaggtcctgaggcagaaggaacccagttgttagagaggcactgaggctagcagggctgaaagcaggatgagtgaggtgaggcgaggcagagtcctgtgttgtcctgcgtgggctgtcatgagcctttgcaacaaccttgactctgacccgagaaacctgggaatgaatgggctggattgggctgagatggccaagatatgaggtgagtcccaaggtgggaagcagcccctgagacattccaggcaagatgcgtgacttagagcagggtgggactactgaggcagcagcagaggtcagatgcaggaaacactcctgaagcctagtgtaggattcagtgtccgtgacgcctacagattactcagaagggtttaccctgtgcccccgggacacgagaccacacagcgcatcagaatcaggattccacaagattttcttccctgtgggtaaactgaggctgagcttcagctcagggataagccagctgcatctggaaaccccatctggccagagctagatggcgtcctcgagtttcctgcttctcatccagcagagggcgccatttccccacagaaggccagagtgcaagctgttgtgtatggagaacctacctgggtccagcctcaagcccagatcagcctaagcaaattgcagtgaagacaccccgaggagacagagacccgaccttgaggggctgggcttctgcattgaccattgtgtgagagtgagcattccagaatcctgggaggcaggtgtgctttggctgttctggggtacaatcaacccggcagccttggagcaggtgagggctagcgtgccacccagggccggggcttagctctatccccagtgccagaaatcagaggcagtgccagctttggtgtctggtgagggtcgcatccaagtgagcatagcagagtccttagagaagaggagctgtgcccacgccccttcagatcatcccccagggcagctgcagttctgagaagcagggcagagctttgaaggctcaacccagcttcccagtgaaacgcacctctcctgcctcccacagaggagagatcgcccacatgtgtgaacttgtgttgactctcagccatccctctcctgtgctctgtgacccactgagtcagcagggtgaaggcacaggaagcccgtagatgagaaatcaccctgccagccctagagcgccacccctcagaggggtgggaccagcatggcctggagctgtgccagcagcaaggtcttcctggttctagaaggtggaagacacacctggaagaaggaaatggcctttggcatccctcagctgctgctgctgagttttgtggcctatgtgggtggcatccagacccatgacaggtcctactgtggctttgaatgcttggcacccaggtgtcatcagtgtcacgctatgtgttctccgagagtggtgtattcattttcttctctgggttggcctgggctcccagttgagggcacagtcctcacgtcttggtgccgaagtcatggctcaggcacacgatgccgaaggtcacatggcatctatccatgtgaagcagagatgagcgctggtgctacgcttgctcacctcattttatccggtcaaggacccctgcccagggagtactgtagccctcatttatcatgtatcttcccaccacccgtctagaaactccctccagccctgcccaggggtttgtttccatgatggctaagtcgcatccaattgacagtttgaccacagcaggggcaagcaggcacttgaagaccagaccttggattgggtgagcagagacgggggctgggggcttcccactctgctgagcctgcctgtctccccccaacaggtgagaccttcctgccctactacactggccgggccattgacagcattgtgatccagaaaagcatggatcagttcaccacagccgttgtcgtcgtttgcctgctggccatcggcaggtagccacccaacccatacacaccactcctgcaggagggagggcagaagggagcagggccagcccagcactgcagcaaccgcccagactgacgtggaaccctttggttgggccacatcccagagctgtaccctcttgcctctgaagatggctccagtcccctgaagatagctttctctctccctggctggttggtgaatatgtagcccaaaggattggttttctatactgttctagaagggtctggatgccagtgttaagtcctttacccttgctgtaggacttactggggagtgaggggtctagacctggatgtcatccctacagagtggcctgtcctctgtccttggggaggaggggctgctggtgggtgatgctgcctgccggaaggacaccggctataccgtctctcatcttcaatcagctcattggccgcaggtattcggggcggtattttcaccctcgtatttgccagactgaacattcgcctccggaactgtctcttccgctcactggtgtcacaggagacaagcttctttgatgagaaccgcacaggttggtccctcctggggactttgggtgtccagggtgagctagcttcctgtggggcccctgacagcagcatggcttgccccaccagcacttcctatggtctagttccaggtggagccctgggatactaagctgactggtgacgtttttggtgtgagttggggccaccacagaaccctggccaggcctcttgagctctcggcagtgaccagggcctcctcttgtctagtgctgcctgagagggaggcctgcagaggtccagttcctgtggactgaatgatggatgggaagatctagcagggagagaaacagcatgcccgccatggtcccaagcactgggccaggccacacctgtcccacccatcccatgcagggaccatttccctcctgtagtcgtcgccccgtggctgtcgcaaggcgtcttctagtccagcattccacagtgtatgagaaacgctgctatgcgtttctctctctgagctcaggaggctgtgtctgaggtgggtgtgagggtgtttacccactctgccagtgaggcctagcagagagaagtttggaatctggctgtggtgggcacatgcgctgtcacgttggctgtccccagctgaccttcagccagtttccactcggtagacaggcaggcacctcacacaacacgttgcaaccatgtgtggtacacacccatgaccctgtgacccagggtggcctcaaacaaaacaaagaaaaaaaaaaaagacggtaccaggactagtcttccagaagtgctccccattattcccagatagcagagtgggggagaggtctgactcctattatccatctcagaagccccttagcgtcccctccgccaccccgcccccagcagctctgggcatccttgccacagagggctgagtgcctgtgttccaggggacctcatctcccgcctcacctctgataccaccatggtcagcgacctggtctcccagaacatcaacatcttcctgaggaacacggtcaaagtcacgggcgtggtggtcttcatgttcagcctctcctggcagctttccctggtcaccttcatgggcttccctatcatcatgatggtgtccaacatctacggcaagtactacaaggtaggcggagtctagcccctggcagtgccttggaggctacacaaggctgttctgaggcagtctgtgttcattcacagtcttcacttggtcactgggtgtctcctgaggacccactgtgtgcccagcactgggaagcagtgaagcaggctgccttaggtatcagccaggcatgatcacatccatcactccagtggccaaggactgccactacacgttcagacccaccttagtcagagagaagaccctggtaggaacagaggacaaggccaaagtgaagccgtaagcgtggggtggcgagcggacccgaggaaggtgggcaccctcaggactgtgtgttctgaatagaggggtacagcacaaaactctgtggtaggaatgtgcctggtgggtctgagaagccggcaggtggctgtttgggtaggtgatgggagacaggacagtggcaggtgatgagggcagagtctgaccctctggttttgagggggatggtgacgtgggccttgcctgtgatctactctgaggcagccagaagtccctctgccgttgcctgctgactggacttgctcttcgtggcctcctggagccccagagctgagctccaacacacaaatctgagccccaccacaggctcaggcacccctggggaggtgactcaagaggggagcttccagccttgctgggtgggtcattttccctagctctaggaccctcccccgtgtaaaacagctttccttcaacctccagcaaaaggccaccagccctaagccctgatcatggactctcctctagctcctcactgaggaggaacaggaaatagtcaggatggagctgctccctgcccacctcgttccttctcattggcctctacctctgcccacctcaggccccacctctaagtgggtagagccttaaaggaatttgttcagggtctgccatctttacaaagcacacataccacctgcagccagatgtgctgctaggggcccaaggggtaaaggcaccgaccactgtgcaaacctggggacctgagtccaatccccagggtccattgaaaaggctgaaggacataatcgactccgtaaagctgacccatgccaggggacgtctgcctgtgtccctaacacacacacatacacacacacatgcacacacaccagacgtgacttgggaccccacctcccaggtgcagtgggccttttctcttttctgctctctgtgaccaagtgtgacattcaggtcatagaagcagccctataggaaggacacactcgtgcctgctctggcagccattgtgtttgttactgcagagcagactgctgcaggcctgcctcccctctgaagctgcttgtgctgctgataaactctgccccttagtgctcactgtttctcatactgtgtgcagcctgagcaacagcccgggatgaccatccttacagcagcgcagggccgggtgcggacactccttttctagagctaactgtagtccaagtgtggtcagtggtctcactcaatgtcagtgggggccctgcttcactgcccccccccccccagtgctgggcactgtgagtctcctagccccccaggagctccgctgggtttgctctcttgagtctgtctcatcagttaggaggcgatggggctggggtggacagaacgggatggaggtgtgctcagagggacagtgaggccgtcctgcccatccctgtgcacagaggctctccaaggaggtccagagcgccctggccagagccagcaccacagccgaggaaaccatcagcgcgatgaagacggtgcgcagctttgccaacgaggaggaggaggccgaggtgttcctgcggaagcttcagcaggtgtacaagctcaacaggaaggaagcagcggcctacatgtcctacgtctggggcagcggggtacgtgtggtcaggcgctggggtgagtggatgggcgtccagatatggatcccatgcttgggtgacagtccaggtccccacatgtgggtgtcaagtcatcagagtctttcctggaaagaccacagggcccttccttcggaggcccctgtcccccctacaaggtggcagggtcggtaggagcatgtatcctcaggctagctagggtccaacctaggcctcagctcctccctagagaatggagaggacctggtttgttcctgtcccaacagtctgggaggtaggagctaggctggtctgggagggtgggggcaaggagatacagagtttctttggaggaattagctgtgtgtgtgtgggggggggtacaggggagccaggaggcaaggactactcgggtgccactacctgaaaatgcctgccaagcctctgtcgactcatccacagctagccactgtctgccatacacaaggacacttgtccagctgctggacttcactctggcttggggtggggaaggaatcctgggaaggttgtgggttgtctcatctctcagacacccccaccctccaaatccgtagcatgaggtccccaagatactgtccttcttcaggaaaatacttaaaggaacagaaaggcctcactagcctgctctgactggctgctgtgtggccttattggtgccccaacctctctgagccctgctctttgcaatgagaatgaacagccctgcctggcccagcagaggaacttgaaggtggcatgtgccagccagggctttacaaagaaagccttgttctgctgccaagcccacagcctgctccagctaggggcctttgtagggagctgctgggggaagggtgtgagtgacagatggggcaatggagtttccgttggtgtttagcacttctaaggctgccctccagcacccagtgagatggtttagtgggaaaagacactgtcaccaagcccggtgatctgaggtcctcccctcaagcttctctcctgtctccctggtcttgctaacagggaacagagttgggggacagagtagagggcagggcccagggctggctaaggccgggaagcttacataagccatgcccttctccttccgtgcagctcacactcctggtggtccaggtcagtattctctactacgggggccacctagtcatctcggggcagatgagcagcggcaacctcatcgccttcatcatctacgaatttgtcctgggagactgcatggaggtgaggggcagccgtgggagggcgggggtgtgaggcgagagcaggttccggattctgtggggtgggtaggtttgaaccaaacagaacgcgtggaagacggcagtaagacccatcccagaactccaatagggcacctctaggataacagtgccagagaagcaaccgctgggccggcacaaatggtgaactggtggaggaacacttacaggcacgttgcgtgtgtgctgtgagctcccactgacttcacagcaaccgtgtgccgtcttggtgttacctcagtccccaaggtggacataactatgacagcacctcaagggctgcacacgggagtcaggcaggcatcttccacccatactccgctgccacatccctcagcatgaggtgggacaaaatatttacactctcttgtttctgagagaagccacctcattgcttaaaggcactcggtgaagatggcttctgttttggtccatgtttatactgggtgtgcttgtagccacagagaatgtatacagagtacccacgaagatccatattaaagattaagttagggctgaggctggctcccttggcagagtgcttgctgagcatgtgtggctctgggcttcatccccagctcaaagaggtgctgctgtggggctccaccacagctcttgagaggtgaagcgggagggtgggcctggggcctctgcctagggtgggaggcagagcaggggactgacagctggcagcctgggcatcaagtcagagtccctaacactgcagctgggatgtctccaaggctctgtggtatccccgaagggaagggacccatgctgagcacatcatggcttgccttttgtggacttccttcccctcccccaacacctttaaccctggctgcagagactgggggatctctgagttttaggtcagcctggtcaaatggcaaagtcctgtatcaaaggatcgccttcacctacatgttgagttgtctgaaactgtccggatggacaacaattgccagcttatcacgcgccttttaatcccagctctctggaggcaggggcctgcagatctctgggagttcaaggccagcctgctttacatatggagttccaggatagccaggactatgttgtgagaccttgtctttacaaaaaacagggaacttagaacccgctgtggcagccagaggaaagacttcctgctctgccctgctccccacacatacccgctgcagggttgagtgggatccgtggtccgaccctgggccctggctcctaatgcccagacacagtggcgttacattccccatcgcccttgtttttttttttttcttcatggtcactatctgcctcagcagcaggtggcatccaggggctccctgcatcgcctcaaagctgcagctctgacccgtaacctcccctcaccccatcagtggtaggtgtcaggaaggggctgtgggtgggaccaggatgtgtgtcttccctgcagtccgtgggctccgtctacagtggcctgatgcagggagtgggggccgccgagaaggtgttcgagttcatcgaccggcagcccaccatggtgcatgacggaagcttggcccccgaccacctcgagggcagggtggactttgagaatgtgaccttcacctaccgcactcggccccacacacaggtcctacaggtaagaacagctcaaggtctgccagaaccatcccacatcttggttgtgaggccagaagcaagagaggcaagggcgccactgagaggccgcccattaactctccagtaagagctgctggagagggctggtgtgtcacacgcagagtgcctgcctagtgggaaccaggcccggcttccaaccccagtaccaaaagggttgtgtgtgatggctgggggtacggggcttctttagtgacttgacaagaagccagattggtggactaaagctgtgcggacattggtgtgaatggaaccctcaatttgcatgccacgcccttccagaagcactggcaaagtcatggatccggcttctgtagggggagaggcaggaacacggtgcagagcctctcagagggaggtgacctttaatcagggagcaggagctgaccaggtggctctctacagaaaacagtcagacgaaggcgactgtaaatataaagccagagtcaccaagccagtcctgtttgctcagggtttgtcatcccagcgactgatatggcccagggcaggagggccacaagttcaagccccaccccaggactgcacagcaatgagtgccaggccagtcagtgaaaagagagctgagctatctttccaacattttgggagtctacagcaggaggattagcactatttaaaggctggatagtaagttctagccggccctgggtcccagtataggggaagtagctcagtggttgagcttttggctagcatgcacatgttgctgggttcaattccccagtaccacagaagaagcacatatgttcaaagtgccccagtcctggtatcttaggaagactgttcagaggccagcagcaccgcacagggcagacaggaggctgtcctcctgcctctgagactggaacatcttgtgtccctgcagaatgtctccttcagcctgtcccccggcaaggtgacagctctggtggggccgtcgggcagcgggaagagctcgtgtgtgaacatcctggagaacttctaccctctgcagggcggccgtgtattgttggatggcaagcccattggcgcctatgaccacaagtacctgcatcgtgtggtgagtgccacatgcctattggtccccacacccttccctttcttataagccatgacacggatggaaagaagggtgtagttctgtcactgatgtgacaccccccacccccatgcagaaggttgtggcactccacaagccaccacgtgccccctctcctctcctagaggtaaatccccgccccaccagtgtgacaacctttccttgatttgcatgaatttgaccacccggacttactcagatctcacgactgcttcctccagcctgagcttgctccaggcagatctgaggtgcacaaggtccctcctgttcccgcaggcgcagacggagctgaagtgcagggcacacacaggcctcgcttccttcttctgtaacgttttcatcagcagactcgcactccacaataattcttactgtggcagggattgcgtatggaatgtcttggcgatactcacccttgttactctctcttgctcctgcttctacttaaatgtatgtccttctaaaataacacacacagatacacacacacacacacacacatacacacacaaaagatgatttttttctttaaaagaaagaaaaagttgatccagtgctgactgacacacaagcagaggggcctgtacaggtgttcagtctgtgtactagacacaccatctatccaggcaggagagcccttcactgctggtgtgtgtatgtgtgtgtgtgagtgtggggggggccatgtaagcaaacatacacatctagcgaatgagcacgtgtgcattatcagagcgggatctctggtccttccgtgttagatgagcaatctaccactgagctagcagagctctagtctccatgtgacaggacccacatgctggaaagtccccctgcattgagcatatgtaagcagagatggttagcagagaagggtatgtgacacactgggctgcaggaagagccctgggcagctgcaaacgtgagcgcttagattcccagactgccaagtgtcagcgtgaggaagtggcttcctgcaggctttctcacttcctggcggtgaaagacatgaggccccacttatctgcttattaatcatccagggttcctccggcgaatactgtctccttgactttttttaaattattgcaagcacaagacagtcaagtaccacactgtagccttgagttagtgattttctcatactgtagtgttttttttcctttttcattcattcattcattcattcattcattcatttattcattcattctctctctctctctctctctttctctctctctctctctgtgtgtgtgtgtgtgtgtgtgtgtgtgtgtgtgtttacacgtgtggcatgcatgtttgtaggtatgtgttgagaggcctgaagtcagcccagatcacttccacctcatagtttgaggcagaacttctctgtgaaagccatcatagctgtgaccctctcaccagccagctctaggaaccctgcctttgttctctgaagctggagttagaggcaggcctccatgcctgcccagcaccagggtgcgcttggtgagctgaactctgtccctccgatttgttcagcaagtgctttaaccccagggctgctgtagaggctggacacttaaccacagctctcgggagaggctcacacaggagggttgtcaggatttcaaggcagcctgagctacatactgagttcttggcgagtttggatgacagagtaagaccttgtctcaaaaaaatggggtagggagctgggcagtggtggtgcacgcctttaatcccagcacttgggaggcagaggcaggcagatttctgagttcgaggccatcctggtctacaaagtgagttccaggacagccagggctgtacagagaaaccctgtctcaaaaaacaaaaacaaacaaacaaaaaatggggtagggattagatagaataagggcaactgtccgggaggcctgttgtcatgcaccctggcaaagtcacaaagctacattccatctccctgctctgtgctcaggggaatcttggcttagctcagagcaacaggattgctggctctggattatcattctctgaggcctgaggtctaggatcatctgtgtacccagggcccctgctaggaaggaagagacacagctgagctcagccagccgtgcagatcagatttcagacctgagactcctggcgtcggccaggcgggacttgggagactctgtgacagctggagggttctttgacagactctctaagtcaccttattccccgattcccacttcaacagatctcactggtgagccaggagcccgtgctgttcgcccgctccatcacagacaacatctcctacggcctgcctaccgtgcccttcgagatggtggtggaggctgcacagaaggccaatgcccatggcttcatcatggaactgcaggacgggtacagcacaggtaccaggaggcgactctgagttaggaactggagcgatgcacccaggccctgtcataccatttccttcccattgacatgaaagccccatcacaggaacagctgtgaggtagcctcagggcacaacctcctcctccatcagttttgaacacttggtaaagatcgtgtacaccaccaggcatgatggtacatacgttttcaagttcgaggccagcatggtctacagagtgagttccaagccagccagggctacacagtgagaccctgtctcaaaaaaaaaaaaaaaaaagcgaaaacaaacaaacatggactggacggcttaggggcactgctgctcttccagaggaccatggttcgatcccagcacccacatggtggcccccagctatctgcgactcatgtcccagggaagacagtacttctggcctctaaaggcaccaggcatgtggtgcacaggcatacatgcaggcaaagcaccaacacgtaaaatcatctttttaaaaagatttatttattttatgtatatgagtacacggtagctgtcatcagatacaccagaagagggcatcagatcccattacagatggttgtgagtcaaaatgtggttgttaggatttgaactcaggacctctggaagagcagacagtgctcttaaccactgagccatctctccagctccataaaatcatttttttttaaacaagtaatgtttacctgcacatggtggtgtggggagattgcttcaagttcaaagctagccaagagctcttgaggagactctgcctcaacaaatttgtgtgtgtgtgtgtgtaaaatattaatcacgtgggccacttaaaggcttctttagtgtgaggacagctttggagagtcagctctgtccttccacccagggccgggattgaacttagcgtggctgctgcagaaagtgcctttcccgctaagacatcttccagccctttcttgggatatttttcagacgtagtcttactgtgtaggccaggctggcctggagcccgcatcaccagtttccaagatcagagcactcaaatcacaaacgtgcaccacgaccctggtcttttactggaattccgttacgtaaaaatactgtctttttattctgccttttaatggaaaaagctcagctctttaatttggcgcctggcctttgtccttagcacaccttagtgacctgtcatattggtgcaaggacctgacctgcctcctctttacctgcataagtgtgtaggcttttacagtgactctgtttcctaccgacagacatttgagtcgttcttattaacatctgtcttgtaatgacgctgctgtaatcacacccaccaccacctctggtcctctgtgggagagagctgacggaggacattccctgacaggcttgctgacagagggccgtgcatcctgatggtcacactctgtcattgccgtcagtgtcagggcagagcatcacagtggagttgcccagcccggggaagcaggagctggtcctcggcaggcagccttgcaccagtctgcagtgcactgtgacgggttcggccatctgcctggtgcccgtgggggatgagccgcagtgtgccacccctctgcatggagggctaatctgggcgtctcttcctgagctgccctctgtgggtggtcacagctggagaccctcagaaatgtctgccgagctggtgcccaggtgaacaggagaggcctcctaagagctcaccctgcgtctcctccacacagagaccggggagaagggagcccagctgtcaggtgggcagaagcagcgggtggccatggcccgagcacttgtgcggaacccacctgtgcttatcctggacgaagccaccagtgccctggatgccgagagcgaatacctggtgagtgggggcagcagatgccggggcaggggggggnnnnnnnnnnnnnnnnnnnncaggctgagcagtggccacaggttctctcaggccatggaagggaaacagggagttctaggcaaggacacccagctccaagcagagctacagctgagtgacatgggtaaagcagggtgccagaccagaggatctgatggggtgccccaccctgcaatgctcctgtttcctccctcctctctccctcctctctctactctctttgcttttgtttttcagtcctaactcaaccccaggccttgtacaaatgccgcaccctgcaactacagcagggctctaagctactctttccccagtggtaaagtggatagtattggggcagaaacatagttgtcgcctcaaggagacaacacatagtttattctggagccaaattagagtgactgtgtgcaggaacagactcaggttaccccagttccatgatcaacgtggaagcagtttccagtgtcatgaagttttcatagtaacagaacaacaaaagtcacagcgagacacttttcaaatacattgatgggggtgtcagggaggttacagcaaagctgggagctctgtcacaggcttcatttgcagtctgatgacactcttagctttggttaatgaaaactagggtctgctaacttgacccactccagtgggttttattaaacacagcttgctgaatctacacagtggacaagactgacctcagacagttgaaattcctgagctattgccatatctctaatcagacacacacacacacacacacacacacacacacacacacacacacacacacacggtttccagaaatcctcatcacagttccttatgggctaagcatgacattttgtgcatagattttatcaaatactatttatcaaattttaaaatgttcctcacttggttaccccctcctccgtctggtaatacttacatgcggccacaggacagtcatgcagcaggactgctgtggagtaagcaggcagtggcagcgcacacctttgaacccagcacttgggaggcagaggcaggcggagctctgagtctgagacaaaaagagcaagaattctatcggttaaatcagtgagttaacaaggaaggagaaagcatgcggattaacaaagtttacctattgtttaaagagccagatcggccacgtcccctgtgtttacgtgactggtactctctggactgtcttcctagatggatgtaccttttaattttagcgttccttttagccagctcaatggcatagctgtaagctcccagggagtagctgaccagggctccaggtagactatcacaccgtggctcttgcctgtggacgctacttatctgctttatcgtattggcatcgtcccaggcctactgtggaaatgtagatggaaaaccacagcatagaagaaactagcggagactccagaccccctgacctcctcagcacatgctgactgtagcagcaatgggagcgaggctcaggcctgttgggactcggggtgtcagagcctttgcagatctgatgggtctgtgtactttaatggcagaaatggaagtggggaatctgacagggaatcactgcttctcatcagcaaaatacaagcactgtttaagttagtccctgctgaattgtactgtgggacagtgtagatgctgacttaaccaagaaacattagcacttaatgggtaaacttcttgaatgttgctggtcttagagactagcttgtgtgcattgtataagagttaacccaaggctttgggcgtctctggctggagtgagtggggttcaaggttcaaggcatagctgagcttgtgatagggccatttacagtgtttaagttattgtttctattgatttagttggctcgactttgtttttgagacaggttgctctggctgaccgcaaattcacccccaaccccaggattaaaagctgtgcaccaccacaaccagctatatttttttcttaataagaaaatgtttatttaatttggctgtaagaatcttgatttaaaatattgataccctctaaatggaggggtttttaaaaacaaattttttctagatttatttattatgtgtccagcgtactgcctgtgtgtatgcctgcaagccaggagacagcaccagatctcattatagatggttaggaatcaggctggtgttcttccagaggacctgggtttgactcccagcaccgatgtggtggctcacgacctctgcaactccagttccaagagaatctggtcaggcgttctcttctgttctctgtgggcatggcacacacgctgcacagacattttatatatatatatacacatacacacacacatatagatatatacacacacatatatatacatatagatagatagatatagatatatacacatatatatatatagatatagatnnnnnnnnnnnnnnnnnnnnnnnnnnnnnnnnnnnnnnnnnnnnnnnnnnnnnnnnnnnnnnnnnnnnnnnnnnnnnnnnnnnnnnnnnnnnnnnnnnnnnnnnnnnnnnnnnnnnnnnnnnnnnnnnnnnnnnnnnnnnnnnnnnnnnnnnnnnnnnnnnnnnnnnnnnnnnnnnnnnnnnnnnnnnnnnnnnnnnnnnnnnnnnnnnnnnnnnnnnnnnnnnnnnnnnnnnnnnnnnnnnnnnnnnnnnnnnnnnnnnnnnnnnnnnnnnnnnnnnnnnnnnnnnnnnnnnnnnnnnnnnnnnnnnnnnnnnnnnnnnnnnnnnnnnnnnnnnnnnnnnnnnnnnnnnnnnnnnnnnnnnnnnnnnnnnnnnnnnnnnnnnnnnnnnnnnnnnnnnnnnnnnnnnnnnnnnnnnnnnnnnnnnnnnnnnnnnnnnnnnnnnnnnnnnnnnnnnnnnnnnnnnnnnnnnnnnnnnnnnnnnnnnnnnnnnnnnnnnnnnnnnnnnnnnnnnnnnnnnnnnnnnnnnnnnnnnnnnnnnnnnnnnnnnnnnnnnnnnnnnnnnnnnnnnnnnnnnnnnnnnnnnnnnnnnnnnnnnnnnnnnnnnnnnnnnnnnnnnnnnnnnnnnnnnnnnnnnnnnnnnnnnnnnnnnnnnnnnnnnnnnnnnnnnnnnnnnnnnnnnnnnnnnnnnnnnnnnnnnnnnnnnnnnnnnnnnnnnnnnnnnnnnnnnnnnnnnnnnnnnnnnnnnnnnnnnnnnnnnnnnnnnnnnnnnnnnnnnnnnnnnnnnnnnnnnnnnnnnnnnnnnnnnnnnnnnnnnnnnnnnnnnnnnnnnnnnnnnnnnnnnnnnnnnnnnnnnnnnnnnnnnnnnnnnnnnnnnnnnnnnnnnnnnnnnnnnnnnnnnnnnnnnnnnnnnnnnnnnnnnnnnnnnnnnnnnnnnnnnnnnnnnnnnnnnnnnnnnnnnnnnnnnnnnnnnnnnnnnnnnnnnnnnnnnnnnnnnnnnnnnnnnnnnnnnnnnnnnnnnnnnnnnnnnnnnnnnnnnnnnnnnnnnnnnnnnnnnnnnnnnnnnnnnnnnnnnnnnnnnnnnnnnnnnnnnnnnnnnnnnnnnnnnnnnnnnnnnnnnnnnnnnnnnnnnnnnnnnnnnnnnnnnnnnnnnnnnnnnnnnnnnnnnnnnnnnnnnnnnnnnnnnnnnnnnnnnnnnnnnnnnnnnnnnnnnnnnnnnnnnnnnnnnnnnnnnnnnnnnnnnnnnnnnnnnnnnnnnnnnnnnnnnnnnnnnnnnnnnnnnnnnnnnnnnnnnnnnnnnnnnnnnnnnnnnnnnnnnnnnnnnnnnnnnnnnnnnnnnnnnnnnnnnnnnnnnnnnnnnnnnnnnnnnnnnnnnnnnnnnnnnnnnnnnnnnnnnnnnnnnnnnnnnnnnnnnnnnnnnnnnnnnnnnnnnnnnnnnnnnnnnnnnnnnnnnnnnnnnnnnnnnnnnnnnnnnnnnnnnnnnnnnnnnnnnnnnnnnnnnnnnnnnnnnnnnnnnnnnnnnnnnnnnnnnnnnnnnnnnnnnnnnnnnnnnnnnnnnnnnnnnnnnnnnnnnnnnnnnnnnnnnnnnnnnnnnnnnnnnnnnnnnnnnnnnnnnnnnnnnnnnnnnnnnnnnnnnnnnnnnnnnnnnnnnnnnnnnnnnnnnnnnnnnnnnnnnnnnnnnnnnnnnnnnnnnnnnnnnnnnnnnnnnnnnnnnnnnnnnnnnnnnnnnnnnnnnnnnnnnnnnnnnnnnnnnnnnnnnnnnnnnnnnnnnnnnnnnnnnnnnnnnnnnnnnnnnnnnnnnnnnnnnnnnnnnnnnnnnnnnnnnnnnnnnnnnnnnnnnnnnnnnnnnnnnnnnnnnnnnnnnnnnnnnnnnnnnnnnnnnnnnnnnnnnnnnnnnnnnnnnnnnnnnnnnnnnnnnnnnnnnnnnnnnnnnnnnnnnnnnnnnnnnnnnnnnnnnnnnnnnnnnnnnnnnnnnnnnnnnnnnnnnnnnnnnnnnnnnnnnnnnnnnnnnnnnnnnnnnnnnnnnnnnnnnnnnnnnnnnnnnnnnnnnnnnnnnnnnnnnnnnnnnnnnnnnnnnnnnnnnnnnnnnnnnnnnnnnnnnnnnnnnnnnnnnnnnnnnnnnnnnnnnnnnnnnnnnnnnnnnnnnnnnnnnnnnnnnnnnnnnnnnnnnnnnnnnnnnnnnnnnnnnnnnnnnnnnnnnnnnnnnnnnnnnnnnnnnnnnnnnnnnnnnnnnnnnnnnnnnnnnnnnnnnnnnnnnnnnnnnnnnnnnnnnnnnnnnnnnnnnnnnnnnnnnnnnnnnnnnnnnnnnnnnnnnnnnnnnnnnnnnnnnnnnnnnnnnnnnnnnnnnnnnnnnnnnnnnnnnnnnnnnnnnnnnnnnnnnnnnnnnnnnnnnnnnnnnnnnnnnnnnnnnnnnnnnnnnnnnnnnnnnnnnnnnnnnnnnnnnnnnnnnnnnnnnnnnnnnnnnnnnnnnnnnnnnnnnnnnnnnnnnnnnnnnnnnnnnnnnnnnnnnnnnnnnnnnnnnnnnnnnnnnnnnnnnnnnnnnnnnnnnnnnnnnnnnnnnnnnnnnnnnnnnnnnnnnnnnnnnnnnnnnnnnnnnnnnnnnnnnnnnnnnnnnnnnnnnnnnnnnnnnnnnnnnnnnnnnnnnnnnnnnnnnnnnnnnnnnnnnnnnnnnnnnnnnnnnnnnnnnnnnnttcttttttttttttttttttttttttttttttgggttttcaagacagggtttctctgtgtagccctggctgtcctggaactcactttgtagaccaggctggcctcaaactcagaaatcctcctgcttctgcctcccaagtgctgggattacaggcatatgctagcttttcttaatataggccatgatattttcctttaattagagaattctgctctgttagataaagagatgagtggggattggtctcaggattcacccttggttcccttagaacctcaatatttgaaaacaattactcaacttattaattttatttttatgtgcgagttttttcttcatgtatatatgtgtaccatgcacttgcctggtgcccaccgagatcagaagagggcatcggatccccctggaactgaagtcacagatgcttgtcagccaccatgtgggcgccgggaatcaaactttgcccctctgcaaatgttcttccccactaagccgtctctccagcccctatcattgacttaactcacattcaatgttactaatttctgtaagctaccgcttttataatttcttttccattctcacatgagaaagcaggctgcccattcatgattcttttatggcatgaaaaacatcccagtttccgaatgttaaacgttccccattgagggaaccataaagccagtgaatgtggttccatcttccacatgttcaaatactttcaagtttgaagtctgtaaatcatcacatagacctgactggccccgacccaccacacacagggcttatcccccaacaaatctttttaaaaagctttttctcatttttttctttcctttgaaaaactgcacgagccagaggtggtggtgcaagccttaatcccagcacatagaaggcagaggcaggcagacctcttgagtttaagaccctgggtggtcaaatatgtcttcccagctgggccagtcatgttccttatgacccagagatggagcgaatctgccccctgggtgggcgatcaagtgcctcttacttttattaccaggctccaggaaagtcctcagcttaaggcagcaaggctgtaagaagcagaagccgggaacaggattgtttgaggaaagtcaggagacaacgtcaaatagcagcaaaccaaagtattctaaaggcaaagaaagccaaagaggtagccaagtgcccacagacatctaggagcagggaactgcctgcctgcaaaggctggctgactcctctgatgaaagtggatgatgggtcttggagcccataccgggtactgtcagcacatatatcaccgaagagggagagagctgatgctggagcccatagactccaggcacacggacttaggttatcccaaatcccatgttccaacatggaagcagtaacagaacagattggaaacagagaggcaggttatagccaagaggggaagtctcagcttctctgtcggtcacggtgttaggtcagactgagaatgggctaagaatgacgacttagggggctaaagctagcccaatttaagtcgtaatgagacgcagcaaccttgcagtctcttcacatgactgcagttctattagaactgtctgtgagcgctattagtccgccagcctttgcagacacagcctgtttcctgaaatcctcactcagtgcacatgtccttgatgctggctagtgccacatccctccaagggtcgatctctctcacacagatggtgactgacctgttcccaggccccaggtaccactctagacactggagtcttaggaaaaggctgaccagacaaacaagacctctgcccgcatggcatttctactctcatgggacagacaggtcacaaacaaggaaacagcctgagggttctgtgctacagagaaaaactgtcagtcatccaataccaggaatgggatgggcggccactgtccagcataagcacatctggccatcagtgagtgctgggagggagacacggctgagcattattttcctggtgcagaggttacaggcatttaaagggacagcacggggcgaggaatggcagagtgtcagtgcgggccacagcgtggccctgtgttcaacagaagagatagaagctgactgcaaagaatggtgacgtgactctctctatagtcatgttcaagaataatgctctcaggcccttgaggacatctgtggttataggaggtatatgtatgtcacaagagtcacagaagggcacctgtgcctccgagcccttgttagtaaatgctagggaagaaggccggtgccagggcaggtactgactccgataggacatgtggacatccatgctgagcatctcaggaaggcatccaaggatccctgagcatctgggagtctctactgcacaggagtgttgtcttgggggctgtatggagtcgctagatactctatggcactcactgtgaggaccaggctgtaagtcaccacttagctaagtcctggacacacaggagccagctgtggggagttctggggctgggtaacagagtagaggcagagagaaggccagaagcaaggaagaggcagatgcctcaggctccggcaggcattttggactttttgtaacaagtcacttggttttatttttccagactttttaagtgtaaagaaaacaatgcagaaagttcatagttcccagctctcctttcccccatcctgtcctctgccatgcacagtgcatctgtgtgctctgtctgctgcagtccttcctttactaatgactataaaggccttgttcttggggtgtagttctatggactctgagaagcaggacagcacagtgcgctcgagcgcgcgcgcacacccacccacacacacacacacaggtcacactatgtgagaaactactacaagtttgcatcaaatcccaaagcaaggtgagaagccagtggaagcaagaactgaccaaaacagtaaggagcctggagaggcggtgcacacccgccttggagcacacccaccaccccagcccacccggaggcaggaggagcaaggtcactctccaccccctgaggtttgaggcagaccctgtcttaaaaaccagtgcaggtcagtgagtggctcagcaggtaaaggtacgcgatctgaaacttgccaagtttagtgccaggatgccacctggtaggaggcaaccagttcccacaggttgtcctctgacctctacatgtcaacacatgttcagtgtcacgtgcacacagaccaaatgtgtgtacatatgcacacatacacaggtgtatacacacacacacatgtgcaaggacgagtaatttttaagggaaatgagtggattgctttttttgtcctgggcattgaggctgaagggataaaagatgtctagttcctcaggtacccccctatgttagcacctgggctgtctggaatagaaactcaggacttgagctgccttggtccttattttacaacccaagaactgaatgtcagctggcagcagcagggtaggtgacagcagggcggtggattttctgggggatggtgctgatgctgcgcagccgctgcgcctgctcacctttgctccctgttccctgcagattcagcaggccatccacggcaacctgcagagacacacggtgctcatcattgcacaccggctgagcaccgtggagcgggcacacctcatcgtggtgctggacaagggccgggtggtacagcagggcacacaccagcagctgttggcacagggcggcctctatgccaagctggtgcagcgtcagatgttggggctcgagcaccccttggactacacagccagccacaaggagccacccagcaacactgaacacaaggcctgacagtggcccccaggctgaagcactggaggcgacctgccaagtcccactcctgcttcctgcatcttgcctccttccacttgctccccaggcacccgccagctgccatgggcttacccccttctactgtgtccttcttggctcctccaggcctgccaaggtagagcagcctttttaaaccaagctaccagggtttttactgctcagttcaacgcactccagtcaactctgagatttcaaaaagaacctttttgggactggcagtgagcaagctcactaagatgtttccaagacttctgagccaagagtgcaggaccctttctgactgcctggaggatgtctgggagagaactaagcaccaccctttgcctctcgggagaagcagcctccctgtcccctagggggacacaagggttggcctttccatccttccagtctcccggctctgtgagtcaggccagaggtggggcaagagagtgggaggtggcccactgcccatcacccccctgccactcaaagccagtctcactgtgaaccactgggacctcagcagaggaggggctggccgggcctggtgggcctcggggtgccctcagccccgcacccagcacttgaacccttcaccctctcccctggctggcaccttccctcctgtccacccctgcaactctgcggaggaacctgtcgtttgtaagatgtattctcagattggtggagggggaccaaggcaatgcccagggtctggctttgtcctggtttcaagattttgggagaactgggtcaataaagtgtactacctctgacctctacccggtcatgttttccttggatctggttctcctctgggccttgcacagtacagacagctgtgtaggcggttcagtgctgtcttgaagtccctgtctgtgttgttcacatccctaggaattgagcagatgtgtgtgtgtgtaaactgtctccacataccagggactcctgagttcccatggcagctaaggaccatctgatagcatctgcttttgtcccccacactcccacccagtttgaggtagagaacactgttactaagagtcttgatccagttattttctcttgtcagttaaaagaattaaaaggcagggcctatttaccccaaatttgtgggcctccctttgtgcagcagaccaaccctgagttaggggagggagaccaccttgaactcgtcaggatggtccacagccccaccggcaggagagaaagcctgaccttttgtctcagttgaggcatctgctcctggccctctccccatctgctccatttctaggtcctcagtactactcagcactatggcaagggaggtctgggcctaggcagggcctgtgggtaactcagtttgggcattttgttttgtttttttttttgtttctcaagacagagtttctctatctagtcctggctgtcctggaacttgctttatagaccagggtgacctcgaactcagagatcctcctgcgtctgcctcctgagtgctgggattaaaggtgtgtgccgccaccacctgcctcagcttgggctttgagccagggtctctttctggtgagctgaccatgaacttgtgacatctggggtcccgggtggatattatgcccactaggctaatctgatggaggcaatgcttcactgagattcccctcttaccaggtgtgtctaggtttgtgtcaagttgatgaaccctaaccagcacaggtgtcatagatcttgctttgcctttggttgtctgtggcgactccagtgtgtaaatacgtctttaatgttgtaaggacccaacaagatacactggtgagccaaactggtccagaagaagctgagatggccgaggtgtgcttccgtgtcacagaatgggcctcggtttccccaactgtaaaagggaatgcatttcaagaacttcctgcctctctgctcttccctcggtgggggctctggggtgagcacaggtcgtttgtttcctcttgttgaaaaaaatgaccctactctgaagaaatgtacactctcatagtttgggagaccacaaatctaaagcagggtgtcatggggccctagaggaaaatcttatgtgccccttccgaattttggtgactcctgttgttctttggctgatggtcccagcctccagcctctacctctgccatcaccagctttcctctgcccttagctcaggcctccctctgactttagcagaacccgacagtacactgaagtggcccagggatttcagagccagcttcccttgagagccttgacttagtatgtctgcacagacctttccttcaactagggtccactcacaggttccaggaatttggcatggatatcttttgggggtatccattcagctccccacaaagggacacctgcaacctggctcacgttaaccttggcactcagctggtttgtagaatggaggactaaaagtttgtagtcttcagatgtttccagattaagttggaaataccaactgtagagtggaaaccagctgcttctgcttctctgtccattccccctccccaccccccgccaacccctcccatggaagacaatgtattagagttgaaaaaaaaaaccctagggcagacaagttgtagatctcaaagccgctgggagaaggataatggagaagataaagtcaacattttggagagcagccacttcagaaaaagagttaaggaaacccagagtaccaggaaaagcatgccttgcttggctctggctagccttgaggaagaggctgacaaaaatgaggaagccccccacacacacacacacccagcagaacttcctcctgaggacactggtcactgctttgccacaggctgactccggctgtctccgtgagcagagagatctacagcctcagtgatgggctttccagctcttccaagtccctgcagcttccagatcacagcgtaagcagctgccacagggccctggggtgggcaggcacctccgagcctctcccaacaccagtctccttgtccctctcaggctatggacccgggactcttccctctctttgggcagctccagcacctcagtttataagcccaagcctataagtgaggcctttgcctgtggaagaacctcctggagactgagccagtgccacttttagaggctagcaatgaatttagaaataagtgttattttggacagagttaacgcttacaaaaaatccttaacagccttcacggtccctcacacaaacacctcatgtcacaggttcacctatccccgtgggaccaacacatactcagtcactaaaatgccaagcgtttgggggctgtatcaactttcccacccatggctttctgtttcgcaggttcaaacctgcgtgctaagatgcattcggtgatgtttctcagttgcagtaaatgacacactgtataagactcatcacagcgatgcccggtgtcaccaaggtctaattccaggacactttcaccgcccagaagaaaactctgtgcccatgaaccccacatcctctcctctcccagctcctgctgccactaatctacttgttctcaaactacaggatgtggacatttcgcacaaatcatctaaaaagggtctctgtgtggctgacttctcgctcagcatcatgttcccaatgtccctccatattgtagcatgtgtcagaactttattcctttttatggctgaataatagtccattgtatggagagaccacactctgtgtgtctattcatccacggacggacatctggttgtggctgccctttgactattgtgaggagtgctgccgtggacatctgtggatttgtatggatgtcggtgtgcagttctcttgggttggtgggggtcacaggacgactctctctatcctttttttttttttttttttttttgggttttcaagacagggtttctctgtgtagccctggctatcctggaactcactctgtagaccaggctggcttcgaacttagaaatccacctgcctctgcctcccaagtgctgggactaaaggcatgcgccaccacgcccagcttgtttttgttttttgttttgggtttttttttttttttttttttgagacagggttttactatgtatccctggctatcctgtaactcactctgtagaccagacaggcctctcctgagttctgacattaaaggcacacacaaatacacccagctctagagacagaatcttactctgtagcccagggtggctttgaactcatagaccctcctcctgcctcagccctaagagtgctagaattatcaaaggtgtaagccactacacttgcttgcttgcttatttatttatttatttagagtaaaggtaaagatgcttgctgccaaaccttatgagttgaatttgatacccacagtccacgtagactgggagaatcaactcctgcgaactgtcttctgatccttatgtggatgccacaggtgcacacgatgtaaagagactttaggggctggagagatgatgagtcagcactggctgctcttccagaagacctaggtttgaatcccagcttgtacactgtggcttaaaaacatctccagtctcaggggagccaatgcctcttctgatctctgacagcactgcgtccatgtggtgcacagactaaccttcagacaaagcattcatacacataggctcaggctgggcacaggtactcaggtcagaccggtcaggttattccatgtgtagggctgggaaggcagagagaaggctggcttttgtccagaggctactgagtcaagtttgaggatgtggggtggaatccgcacactggatcaccaactctgctagacccctgagacaccctgagttaaagctcaggctggcccccatagccttgtgggccggggtcaggacaacaaaatgacggttaaaataacacaggatgagacactaggtaaattcaattcactagttctctggctgaatgaaccacagtactgcagtgaaagatggtttaagactttaaaaactagctgggcgttgtggcgcacgcctttaatcccagcactcgggaggcagaggcaagtggatttctgagttcgaggccagcctggtctacagagtgagttccaggacagccagggctacacagagaaaccctgtctcgaaaaaccaaaaaaaaaaaaaaaaaaaaaaaaaaaataataataaaataaataaataaaactttaaaaactgcccaagctacacagaaaccctgactcaaaaaaccaaaaaatgtttttgaaaattggtttgattttgtttcaaagacagggtcttcctatgtagcctcagactcacaatcctcctgcctcaggctccagaatgttgggattcaggccttccttcccctgcctgtggatgtttgtatctacaaagaccgggaacctgttatgtgtctatcagcgtggggttggaaacctgcaggtcaggagagagcaggcattatcttcctcagtgggaatgttcaccaactgagacctcactccctggttattcattaagccagacatttgaatttgaaagaaaggcttgggacaggacagtgtggtagaatattatctgaggagatgctgtgatgtgcacgtgtcccccatggatgtctgagaaatttgatccccaaccccacaggcacagaggccatcgagggctcatgaataggttgactgtcttcacaggagtctgctgtcaaagcaactctagctttctgtgctctcaccacatggccctgtctaccaagcaggaggccatcgcctcagcctctgaaaccacgacacataaatccatttctgttcgtgataaagtaacttggtctgtaccaagtgtggcaatacatgcttaaaatcacatcacttaggaggcagagatgggggtggggggtagggggtgggggtggggtcaatagttcaaggtcatttacggctaaactgtgaatttgaggccagcatgggctgaatgagatcctatcccaaataccaaacaacagtagccgacaagtgtacacatttgcggtgggatctgtctcggaagtttggggacagagcatgaaggtgatgcacaatcatttagttatttcattaagaattacaataagggactggatagatggttctctggttaagagcacatattgctcttgcagaggacctgagattcccagcacctatattgtatggcttataggcttacaaccactgataactccagctccaagggatctgatgccctcttctggcctccaaaggcactgcactcatgtgcacatacccacacagagagatacagataatttaaaaggagtgggctggacaggtggattagcatttaggagtgctagctgatcttgcagaggacccaggtttggttcagttcacagtcatctgtaactcaagttcttaaggatctggtacccaattctggcatgcgtgtgggtaatacatgcatacatgcaaaacactcagatacataaaataaaagtaaatacatctttttttaagttaaaaaaaagggggggagagtggctggagagatggcttatcagttaagagcactgactgttcttccaaaagtcctgagttcaaatcccaatagccacatggtggctcacaaccatccataatgagatctgacgctctcttctggagtatctgaagacagctacggtgtactcacatataataaataaataaatctttagaaaataataataataataaggggtagccagatggctcagtggataaaggccagcccctgacagcgcttaaagacctaagtttgtctccaggtccttgtgcatggtgaaggaaataaagaactcctgcaagttgtcctctgacctctacacagcgctgtcacacacacacacacacacacacacacacacacacacacatccaacccctggcatgcagaggtaggaggatctcagtgggccagcctgagctacatagcctgaccgcgaagaaaccatgctcagctgttgtcctgggtattgacacacacgtctgccatcatgttctatgaatggttttgaatatccaaatgattcctgcacgtggaggatagaaagctgagaacctgcgccaacccccgccttgatgacttgttctgggaagactttctgggaggatggaacccagctccaccggctctgctgactgaacagtgacgttactgagcccagaggagcagggctatcccatggggaagcttcagtccaccctgccatcaccctggggaggcccagcttcctctagagcactggttctcagccttcctaatgctgtggccctttaatacatgctgtggtgcctccatctataaaattattttcattgctatttcataactataattttgttactgttacaaatcgtaatatagagatctgatatgatgccgggcagtggtggcgcatgcctttaatcccagcacttgggaggcagaggcaggcagatttctgagtttgaggccagcctggtctacaaagtgagttccaggacagccagggctacacagggaaaccctgtcttgaaaaaaaaaaccaaaaaacaaaaaacccaaaacaaacaaacaaaaaacaaaaaaagaaagagagagagagatttgacatgtagtatatctgatatgtgaccccttatgaaggggtccatcaatcccaaggggggggatcttgacccacaggctgagaaacactgctctggagtctgaaaagtggacctggatttctggaacattccagagatggaggccagggtggttcatacctataatcctagcacttagaggattctcatgagtgggaagccagacatggctatataaaaggcagatctagattagcctggactacatagtgagactgtctcaaaaaacaaatagtaacaaaaatattccatccagagatgggactttccctagcactgacacagccagcgacgctgaggtcacttgtttctggcctcaggtaggggaacactgtcattgtaaatataaagcttactgaggtggggagctgactctggccttgtaagcatggagatctgaattagatccctaggacccacagaaaaagctggcacggccaggcggtgctgcacacctttaatccccgcactcaggaggcagaggcaggcagatttctgagtttgaggccagcctggtctacagagtgagttccaggacagccagggctgtcatgcttggggtggggggaagctggacacaaagccagagaagtgactcagtgggtaaaggcagcttgccccctaagcctacagacccaagttcaatacctccaaaacccgcctcaggtaaaggtgcaaagagagaatttatgttacaaagacctgtacgaatgccatcctgcctctttgaacttttgtttttgttttttgttttttcgagacagggtttctctgtatagccctggctgtcctggaactcacggtatagaccaggctggcttcaaactcagaaatccgcctgcctctgcctcccaagtgctgggattaaaggtgtgtgccaccatgccctgcctctttgaacttttaaaaccacattttctttttcctctggtctgaaggtccaggcttcggaggtcatttccacacagctgggggacaggtgatgacagaaagcatgtggacctaaagaaactccagtgaccactgcctaggtgtgcgagagaggtcactgtgccccgctgcctaggtgtgcgagagaggtcactgtgccccgctgcctaggtgtgcgagagaggtcactgtgccccgctgcctaggtgtgcgagagaggtcactgtgccccgctgtctaggtgtgcgagagaggtcactgtgcccctctgtctaggtgtgcgagagaggtcactgtgccccgctgcctaggtgtgcgagagaggtcactgtgccccgctgtctaggtgtgcgagagaggtcactgtgcccctctgtctaggtgtgcgagagaggtcactgtgccccgctgtctaggtgtgcgagagaggtcactgtgccaattcctttaaccacaaacccataaggccattactattaacctcccttctccaaaaaaggaacagggggattttaaaacctatgaaaaaaattgcacagctaaatcacagacctaggaactgaggggctggggcatagacgccagtgggagcctcctcgacttgtacacatgaagtcctgggtttaatcccagcacagcagaaagcctccggcacccggtccaggtggtgtatacacatacacctgatgtcccagcacttgggaagtggaagaacgggatccttagcacacaggaagttttaggctagcctgggctacatgagaccctgtctcaaaaaacaaataatgaaacaaacaaaaataagaataaaaaaacccccttgtacctgagcccagacagcgtgagtaactggactcctcaaaccaaaaatggtttgtgttattttaggcaaggtctggctggcttgaaacttgctacgtaaatctggctgatcttgaacttgtggaacgatcctgcctgcctctccttcctcagtgctggctgggatcattctcgagcaccactgcccagcttcaggctggaactcttaaaattacactttactccttttatattgtgtggggtatgggtataagagcgcacgccacaatgtgcacgtggaagtcagaggtcaatgtccaggaattggttctctgcctccttctatcgtgtaggtccagaggactgagctcctttcttagcttggcagcaaatgccctacatgcttaaaagggggacaaaagtagagaaggttgtaggtgaaactggctccctgtggagacatgtgttcagtgtaactgctggttaagaattccagactggctgggtgtggtggcacacgcctttaatcccagcactcaggaggcagaggcaggcagatttctgagtttgaggccagcctggactacaaagtgagtttcaggacagccagagctacgcagagaaaccctgtctcgaaaaaccaggaagaaagaaagaaagaaagaaagaaagaaagaaagaaagaaagaaagaaagaaagaaagaaagaaagaaagaaagaaagaaagaaagagagagaatccagactgggggcagcaagatggctctgcgagtacagcggtggggcatctgcttggaactggtcccaccctagcagcacagatcattacagatgatgatatagcaaacaatgcacacaagtcacgacgggtcagctgccccacactgaggaaggagagataactgtgttgagtcactaaccaggaagccctgggaagaacaccacccaccaccccgggctcccagtggctttggatggtaagaaaggaggaagctgggcctttaaattgctgagtcacctgggcagtgccaacagccacctcagaggatgacgatggcagtcctcatgatcactgtagcacctcaattgagagactgagatcggtcattcagcaagcatttcctgagtgcctgctgtataccaaacacgtggcaggtcaggagaatctccagtctgaggtaatgagatccgaaaggtgacgtgaggagccaagactgaaggtattcaagagagagagacactactgagctgggctgtctgaggaggtgacaaatgacttcagacctgaatgacagtttagaagttcctgaagaagtggagcgtgccagctgggggtgcagctcggtggccatgtgacctaaggagctctgttctagatgtttacccggaagaaatggaaacatctg

SEQ ID NO: 109 - DNA, 3326 bp, Mus musculus
ggcagctgggctaggctccgaccttgtagcggcgcagcgccggctccgagcaaagcggtgcccagagcgggctcggtgagaggcaggatcctgtgtccccgcgtcccggccacggtgtcaccctctgacgactcacctggtggcaggtgtggccctgcccagctgtcagtgatggccttgccccggtgagccaaagcctgcccctctcacccgccggccaccagccagcaggatgaggctgtggaaggcggtagtagtgacgctggccttcgtgagcacggacgtcggggtgaccacggccatctacgccttcagccacctggaccgtagcctgctggaggacatccgacactttaacatcttcgactcggtgctggacctctgggctgcctgcctgtaccgcagctgcctgctgctgggggctaccataggcgtggccaagaacagcgctctggggccaaggcgcctgcgggcttcgtggctcgtcatcaccctcgtgtgcctctttgtgggcatctatgccatggccaaactgctactcttctcagaagtgcgcaggcccatccgggacccatggttctgggcgctcttcgtgtggacctacatctcgctggctgcctccttcctgctgtgggggctgctggccactgtgcggccggacgcagaggccctggagccagggaatgagggcttccacggggagggtggggcccctgctgagcaggcatcgggagccacactacagaagctgttgtcctacacaaagcctgacgtggccttcctagtagctgcctcctttttcctcatcgtagcagctctgggtgagaccttcctgccctactacactggccgggccattgacagcattgtgatccagaaaagcatggatcagttcaccacagccgttgtcgtcgtttgcctgctggccatcggcagctcattggccgcaggtattcggggcggtattttcaccctcgtatttgccagactgaacattcgcctccggaactgtctcttccgctcactggtgtcacaggagacaagcttctttgatgagaaccgcacaggggacctcatctcccgcctcacctctgataccaccatggtcagcgacctggtctcccagaacatcaacatcttcctgaggaacacggtcaaagtcacgggcgtggtggtcttcatgttcagcctctcctggcagctttccctggtcaccttcatgggcttccctatcatcatgatggtgtccaacatctacggcaagtactacaagaggctctccaaggaggtccagagcgccctggccagagccagcaccacagccgaggaaaccatcagcgcgatgaagacggtgcgcagctttgccaacgaggaggaggaggccgaggtgttcctgcggaagcttcagcaggtgtacaagctcaacaggaaggaagcagcggcctacatgtcctacgtctggggcagcgggctcacactcctggtggtccaggtcagtattctctactacgggggccacctagtcatctcggggcagatgagcagcggcaacctcatcgccttcatcatctacgaatttgtcctgggagactgcatggagtccgtgggctccgtctacagtggcctgatgcagggagtgggggccgccgagaaggtgttcgagttcatcgaccggcagcccaccatggtgcatgacggaagcttggcccccgaccacctcgagggcagggtggactttgagaatgtgaccttcacctaccgcactcggccccacacacaggtcctacagaatgtctccttcagcctgtcccccggcaaggtgacagctctggtggggccgtcgggcagcgggaagagctcgtgtgtgaacatcctggagaacttctaccctctgcagggcggccgtgtattgttggatggcaagcccattggcgcctatgaccacaagtacctgcatcgtgtgatctcactggtgagccaggagcccgtgctgttcgcccgctccatcacagacaacatctcctacggcctgcctaccgtgcccttcgagatggtggtggaggctgcacagaaggccaatgcccatggcttcatcatggaactgcaggacgggtacagcacagagaccggggagaagggagcccagctgtcaggtgggcagaagcagcgggtggccatggcccgagcacttgtgcggaacccacctgtgcttatcctggacgaagccaccagtgccctggatgccgagagcgaatacctgattcagcaggccatccacggcaacctgcagagacacacggtgctcatcattgcacaccggctgagcaccgtggagcgggcacacctcatcgtggtgctggacaagggccgggtggtacagcagggcacacaccagcagctgttggcacagggcggcctctatgccaagctggtgcagcgtcagatgttggggctcgagcaccccttggactacacagccagccacaaggagccacccagcaacactgaacacaaggcctgacagtggcccccaggctgaagcactggaggcgacctgccaagtcccactcctgcttcctgcatcttgcctccttccacttgctccccaggcacccgccagctgccatgggcttacccccttctactgtgtccttcttggctcctccaggcctgccaaggtagagcagcctttttaaaccaagctaccagggtttttactgctcagttcaacgcactccagtcaactctgagatttcaaaaagaacctttttgggactggcagtgagcaagctcactaagatgtttccaagacttctgagccaagagtgcaggaccctttctgactgcctggaggatgtctgggagagaactaagcaccaccctttgcctctcgggagaagcagcctccctgtcccctagggggacacaagggttggcctttccatccttccagtctcccggctctgtgagtcaggccagaggtggggcaagagagtgggaggtggcccactgcccatcacccccctgccactcaaagccagtctcactgtgaaccactgggacctcagcagaggaggggctggccgggcctggtgggcctcggggtgccctcagccccgcacccagcacttgaacccttcaccctctcccctggctggcaccttccctcctgtccacccctgcaactctgcggaggaacctgtcgtttgtaagatgtattctcagattggtggagggggaccaaggcaatgcccagggtctggctttgtcctggtttcaagattttgggagaactgggtcaataaagtgtactacctctgacctct

SEQ ID NO: 110 - protein, 772 aa, Mus musculus
WPCPGEPKPAPLTRRPPASRMRLWKAVVVTLAFVSTDVGVTTAIYAFSHLDRSLLEDIRHFNIFDSVLDLWAACLYRSCLLLGATIGVAKNSALGPRRLRASWLVITLVCLFVGIYAMAKLLLFSEVRRPIRDPWFWALFVWTYISLAASFLLWGLLATVRPDAEALEPGNEGFHGEGGAPAEQASGATLQKLLSYTKPDVAFLVAASFFLIVAALGETFLPYYTGRAIDSIVIQKSMDQFTTAVVVVCLLAIGSSLAAGIRGGIFTLVFARLNIRLRNCLFRSLVSQETSFFDENRTGDLISRLTSDTTMVSDLVSQNINIFLRNTVKVTGVVVFMFSLSWQLSLVTFMGFPIIMMVSNIYGKYYKRLSKEVQSARASTTAEETISAMKTVRSFANEEEEAEVFLRKLQQVYKLNRKEAAAYMSYVWGSGLTLLVVQVSILYYGGHLVISGQMSSGNLIAFIIYEFVLGDCMESVGSVYSGLMQGVGAAEKVFEFIDRQPTMVHDGSLAPDHLEGRVDFENVTFYWHTQVLQNVSFSLSPGKVTALVGPSGSGKSSCVNINFYPLQGGRVLLDGKPIGAYDHKYLHRVISLVSQEPVLFARSITDNISYGLPTVPFEMVVEAAQKANAHGFIMELQDGYSTETGEKGAQLSGGQKQRVAMARALVRNPPVLILDEATSALDAESEYLIQQAIHGNLQRHTVLIIAHRLSTVERAHLIVVLDKGRVVQQGTHQQLLAQGGAKLVQRQMLGLEHPLDYTASHKEPPSNTEHKA

SEQ ID NO: 111 - DNA, 66120 bp, Homo sapiens
gcctggttctgggtcccgtgggccctgctcctgcccacttagcgaggcatgggctccttgcctcacctggccccggcaatcccactgaatttctactctggggtgggtggggcacacacttcggtttttttaatgccaattccgttttcatgccgaatctaagaagccacaacttgctttgtcagcttcagggcaggcagccatgacttcatttctcgcctgaacaaggaccatgctgtcctgcacgctgggtctgaccgtctgccctctctccccagcaccaagcgtgaccttggctgtggcgctcaacggccagctccggcggcccctctgctgctcctcggctttcccggaagtgggagagcctgcctggcctcggcctttgtccagcgaccaggctctgtccccgagaagctacggccgacctgggtctggtgttgggacgcatggaccgggctggggaggtgcacagagtgatgttaactttttcccgtgtgtagatatgtacagccaaagggtcgtgtaaatgttctgcaaaagtgggtctatacagagtgaaagctatttattttgtgcagagaaaaaagtctggagggatggaaccttcagggtttattcatatttaagatgtagctttttgttgtttcaggcattatgtataaagcaacgattattttatggaccaagttttcatgtaactgttgcagtgaaagtgcaatatctgacccccctgctcccagcaggaagttgcttggcccgacaatcacagcccctgtcaggggccctgtggccagtgcctcctcctctcttggccccaccttatcctgtcttgcctgctgcctgggagaccagccatccagagaagcacctggaagagtctcgggccctcctgcaataaaggccgggaggccctgtgggcagtgggctcagcctctccccaggggggcagctcccccacggctcctcactccccgcctgcctgcccagccgccagccatgccaaggacaacagcaatagtcccctggggctctcccagcggccctcagccatagatggcaaggtgggcagcctgcccccccatgggaagtctcttctgtatccaggtctgctttccacctcccttcagattccttttggcacattctcctcttgaggaagtaccagtctttctgaaactaagagagggagggcagcgtcctttaaaaataccaaaaatgtttacagagttgggtgctgagctgcagggctcaggcctgaccagtcataaccaaagggtgaggcaggccttgctgactgccaccccccaggcctgttagaatagaagccttagtcccactcccaccacacccccacgccccaccacctgccttctctttgatttctaaagagggattcagcagagaccccccacccctccctggctcggtctgagtcccactgcccaccccatcacagccttcacgtctcagcccctcccgtctggtctgtccgtgtgccgtctgtttctctgggccatgtgtgagcagtgtccccatctccccatccgtccctgctgtccccgcatcattgggcctgagtgtgctctgtatacaacgtcatgtctgttacaccaattaaagaagcgggaaggcttccttctggatctctttactgcagtggcgaccgtggggcatggtgggatgggggcatggaacagtaatgctagtgacactcacagtgacgccaacacgtgagtgcggggctgactctaggcctagcctgcttctagctccttcctgggatggaactcagtttgccctcacagacctcagtgaaacgggtgctgtgagcctccctgcctcagagtggaagacacagctgggcagtgagagccagacctgccacacaggccacccagccccagcacctggctctgcactgctgcgatctgtggaatgaacatggcaggggaagccgactctctccatgcctgagtgcatggcatttcagagccagctctctgggtttggggttcagctggcatgaggtctggtccaggcaggctgacctgaagaggaaggcacaggcgctggtgtggcctgtgctcacgaccaccagaggacaccccagctttgcccaaaagctcccggagcccttgtttttccctggcagtcatgtagcacccttccctcccactcagcacaaaaagccacagaacagagaaagtctatccagggggcctttaatagctgagaagtgctgctctttcagatgggggtgccaagcaggccggtgaccccaacctccaccccctgcccctgagaagagactgggctgggccagagaccaatccacgggggaaaggccaccagcacccatcaggcttcccactggcaccctgaaacctgcccaggctgggccgccagcgtcgtccacaggccttggccagcgggggccctcagggaagcaacccagctcgcatctggaaggccaggcagtcccctcgggtggcttgctggggaagaaagcacacaggaggaggggtacatcacaaacagagctgggggcggatggcaggcagaggggccacacccaccttgttgatctctctgtgtcgttctttggttacgatttcctctaggacctcgccatctcccttaataagcctgggggtgggagggtctccgttcagcaaggaataggcaggtcccctaatgccagaggagcagaaccacaagcagccggcagaggggtcccagggctcccaccccgcagccttgagtggacagaccctggggcctcacccactctccctgatgaaggcagtggagctgggctctgccttgccagcctcagcccggccaacaacagccctttcaagagcctcctccaggcccttccagcccctgcaactacttactccaagtgaccgtatttttgcccacatttggcctttttcaggcaccaggaaccccgcccggccccactcctcccgagagcacacatcttcagccaacactcccagatcctgtggtgtaagtcaggccgaaagctccccacctggtgcgccccgtctcagggtccaccaccttgcggatgatgctctgccgggcatcccactcctccttggtcatgggcttcatggcctggattcgggacttctgctcatccgtcaggactggaagggaagacggaggtggtggccaggccttgggaagcgaccttctccctctcaggtgctgggcagcacagtacctgggccatcctcttcctccccagctgatcggtgccactggtccagcgaggggcccggcagagcctccacctgctgtgcttccgccttctccttgcccttcttcttcagcttcttcctcttcttcttcttcttcctcctcttgtccttgtacttcccccgcttcttccggccatcactggaggaagaggaggaggacgaggaggaagaagaggagctagaagaactggaagaagaggaggaggagctggatcttgttctcctccgggccttctgcttgcttctctctgtgatgcagggagaaggtgaggctggaaggccaggaggggaagaggtaaaccttcgtcccctgctctggcctggggcaggcacagaccggctacagggtgagcgcttcctgaggggctttccagaacagagatggagcttcccagaggagccccttcctggctcctgcggcgcctggccctcacatctcaggcccggctgcacagaggcatgactgagcgtccccgaccactgctcgcccgacttccccgggtagtaactgcgcctcctctccccgatgcctgtggtcctcaccctccgccccaggggccgtgctggccttgcgaccttgggatgtggaggccgagcagttcctcgaggtgtctttcctgctcttcttctttctcttttccgacccccgtccccgggaccggctgcgactcctcgagcgcttgcgggagccgacgtgagccatggcgccgcgggctggcgacgaagaagacgcgcttgagccgaagcccccaaggccggccgcgggcgggctccaagggtggctctagcggggccggggcctggcgacgcccagtacccgtcaccgtcccgggaaaatgagcgaccctcacccacccccagcgctggggaccccggttttctccgccgactccagtccccgcagcggtgcctgttaagggcccgccccgtgcccggaggccccacgcctgcgcacccggctccaaacccctgggaactggccgccgtccgccgcgagtggcgtctggggcgctttcccgcgctctcctaccctccagccccgcgcccttcgcggcctcgccgcctcaagggggcccccggggctgctccgttcccacctcgaccgccctgcgggccggacagcccgccccgcgccttctcgagaggaagcggcggcgaggaggcttccggccggggcgctgcgcgggaggctggccggctgggaagcgcggcgccgctgcctttcgttctgacgccccaggttccgtcccgggcgcgcccacctcccgcagaggcaagcaggggcgccggccctcgagctccgcagcccctcacgcctgtgtctgccgaagctgcgcccacttccaaggctgccctctcggcgcacgcccgcagcacccacgcccccggtgccctgggaagaaggcgaccctcgcgcgcgccgccctcctccccggctggtcctgccctctccatacgactgcgagctccagactgaggcgccctggtctttccgacgcgcccacccagtgactcagaggtcgcaaactcgtgtccgtaggggccagaaagatcttggcagtgagcgcgggcatggaccccaggcccatccggaaggaagccaggattctgctccagctgatacgtgcaacgtggcatggggctggtgccccaccttcccagggagaccaaactcaagactgcaatatggaagccccctgagtttcaaatgtgtaacccaaagcgtggctgtgcgcttcatccaatctcgggcccccaagttgcaactcttccacaatgacagccgcaaacacaaagggatcttgcaaagcactttatatacgtcagcgcatttgactcccaaaacagctctaggaggtaggtgctaaatgaggaaacgaaggcaccaaaaggtgaaggctcacctaaagccacacagctggaagtggcagaagcagaatgggaacccgggcagcctggttcctggccctgccattcacccctctgccatctagaagatgctactggtggcccacccgagtccactggggggtgatgcctgctgctgagggttcacatctgtgctctctggaggcttcccttggctactggaaggcaccctgccctggagataagtgtctgggaagttattcactcctctctggccccctcatccaggagccagtaaccggtggtgtgggcacactgtggtactgtgggctctgcctggagctctccgtggggccagctgaggctggacgtcctctgaagccacttccttgcccagctgctccctcccctcccctgcttccctgactccctcgctgaagccccattccagaccctgcttctgacaaacctgaactaaggcagcatctttgcccatagaatgacccagaagctggcacaccgttgagccaagaagtgcagtaggctgcggggattttatttctgcccccagaccaaggcaacggagccctcacctgcctgccacccccacactgggcccaagcaagctcaggtgagcgcacatacatccaccgtggcgggctcctctcgggtgaagccatcaccgaagccctcatcgtccaccaggtcgggctcacggcagcacatgggacagaggctgttgcgcacagcagaggctcggagccagacgacaaggttccaacgctcaccagtgcccaagggccgggctccatgcagctggccgccacggtggaggacaccctggcccaccacgtgctccacctccaggggctccgtcagggctgtgggtgcctgcagatggcacgactcaggcctgggcactcacagctgccccaggccctgccgcatgggtcacacactcacctggaagaggcccccaaaatacagggcgccccctgtgaagaccttgcccaaggccacattgagggtgagctcggcattatcatagtggcagcccagctccaggtcctggcccggtgcgtatttgaccacaaaggcccggtggctgtcgagccggcccccgccacagtcagggtacagcagggccatcagcggctgcaggaagcgctcccgcagtggtgtcatcagcggctcgtccagcccgagctcgtgcagcagcacctgggaggggattcctggggtcagcaaggaaactagagggctgcaaccctgggcttccactccacggtgatcccactgtgaccttctttcgcagcccgggcaggcagcccatctgcagaacctctgacactgcctcctgaccccagccaccccctcctctgccaccggccaggcctcacccaccccgtagttgttcatggtgttgggcctccccttaggcatgtccgattgctcgaagtgctccagctcttccagcagggcctggcagaagggcgctgtgaaaacaggcacccggtagatgcgcttctcctctgtggaaggagggatggtctgttggcctgaatgtggccgtgggccggccaggcctgggcttcagtcttcctgtttcatcacctgtgccatggagatgaggcctttgcttttcagggctattgtgatgacttaaggaagtaacatgaggagcaggggaggccgattcccatgccccccacttatgcccggaacctttccccagactctacaagtgtccacagggctggccctgggagctcacatatgggtcctgaggcccagagaggggaaggaagtagcccagggacacccagcaggccagtgacagccaagtcgggatcacagagccaacttcaggctctctctgcacctcctttcatctgatgagccaccgaagtctgtaccccaactcagaagtggctctgggagcctctgtcccccagcaggaaggccagaaggggctgttctttcttgctgggccctgagggggaagaaaccaggctgagaatggaaacctaaacatttcttggcggacgcaccaatgcccaggggtgcagggctagtgtgcccacgatggggccacctcgcagcctaggccctgccccagccaacagcctcagcactatctcagctgccggggagtggaaggcaatgaggagagcacccccaggctgggaggagggggattcattccacccatgactcccaacaaagcacaggctccatgaggggaaacttgtatctgcctcccacaggagcccctagcccaggctatcagtgccaataagaataggaaacactttccaaacactacgtgcgggccctgtgacaggcactctatgcagattaactcacttgatcgtcgcagtgccttaagagagggggttactgttgctcccattttacagatgaggaaactgaatcagaggttaaacaacacgcaaacctcccttgcccagcatttcctgctgggtttagccaataagtgagcccagcaagaaatccgaagagaagtggggcattttttgccctacttggagtttggcatggccgcaggcctccgcccagagccacaactccaggtggtaactgctccctcctgttgccagccctggggggccgggctttgccattccttactggtccctttatcctgcccatacctgtctcaatggtccctttaagatcttggatcagccctgtttgagtgtgccagctgtcccacacatgacacaaatatccactatttgctggatgagggcacgaaggaagggtgaaggaaagaatgaagataccaggctcatggcaggtattgaatgaatgaatgcggatgtcctgctcctggcaggttggtcccactgacccttccagctcctgctggtttggtttttggaggcagagatggtggctggagggaccccagcatcccacacccaggtttcccaggctgccattccctggtcctgccaggtctcagggccaggacctcacccgatactgtctccagccgctggagaaggcccttgaggtctgcgtctggggacacgctgtactcagtcacggccaggaactcgggggccagagctgcatcctgggagcaaaacacaccagctgtggggcaggcagcacccccagccctggatgctacctcctctttccagtaccggccttcaagcactctggctggctggtacctgcagtgagtcgtagacctcaggccgtgccgggtggtaggaactcgcgatgagggctttcctagctgctgactcctgccccagccgctgccgccgctccacctcctgctcaagctggggtggcacagggttgttaccaggtggggcctcccatcctcctgaggccactgtacagatgaagaaactgaagcccagaacgccagacagggcccaggctggaagccaagtctagcctacactcctgaatctatctgggtcaactgcaagttccagactgttagctgaaagggacttctagaaggggacccatcctgtttcaggctgccccaacctgagcctagctgggatgagaacccctagatgtacctcaaccatctgggcccacacagggacaggagacagtcatggccaagtcctgtgttccagaggttgctgaggactctcctgggaagcttcccaccactgactccaggggaaggaggaggagggagtggggcagcagccctggcagcagcctgcggggtatatggtaaggtgtgaggagcccaggggcctggaagctgtggctgggatcacatctgctcctgctgtaaaagcttgggcaagggatccctctttaagcctcagcttctcaatccaaaatgagagtggtgcttgtgcttatctcacagagctgttaagaacggcatgactaggcaacttagcaacttagcatttccccttctctctcctggtgccaagactcaggtgtggagggatgagtggggggcaggaaggaggaaagtgagggcctaagtgacccttcagggatcagggactgaggctaggctcaagctgtgtcctcaagctgcggacacaaatctaacgaggaggagctgtgcaggggcaggggactggtacctctgctaacagctgctggaagtccttggcgctaacacagcctcggctgcgcaggatctgggagcagaaagaacactgagcatgactgtatgacctgaggaaatcccttcactctctaagcctcagtttcccctgcttaaaatggggagaggagccccgacctcaaaggatcatggagagaatgaactgcggaaccctgtcaagctcaggacagggctccgggctggtgttgctgtgaggcggcaagctgagcccggccctgtcctaagcaccctacatgcttgttcattccttcctcacaatctcacagggagatactattacccctttacggtgagaaaaccgaggcagagagaggccgtcattcttgtatttgaagatacggtgcgcggcgtgcgcaaagcaaacgaccctggggacgaacttccctcctccactacccctctctgcccactgctccgtagggacgacagcggccactcaccgggccgtagtcccggcgcagctgctgctcgcctcggaagcgcacgtgcagcccatagcgcgccacgtacaagttatcggtgcagaagcaggcgcagcggcagaagtgccgcggagcccccaccgtcgccatagtgaagcacccacagccctaccagcttccgtagagagacttcgggcacgcccccaaccgcgggaggcgcggaaccagcggccaaggggccgctctaagttcccaagggcggaaaaggacgaagacgcacctcgccaggaaacggtctgcggagaaagatgctcctgggccgggttgggaccggcggcctcctcgttccgcctcccagttttcccactacgaggcagggactaatggctccactttacagacagctgaactgggtcgtgccttcacaggacggggagaggaagggactcggagccccaaggcctttgacttaaacgccgacccaccccccgccgtctgcccggagctcgtggagaaccagccgagctgaggacagtttaaagagctcggaggtccgactagttcccgctggtgcttcaatcatccagccctgtacgtttcagtttggatttagcatctaccccgggtccctgcctggcgcttccggtccctccgccacagtctgttggattacctcagattgccccagtgagtgtctccaccaaaacgctccgtctcgcattacttccggtggcgttcccaatggacgcgggagggcggggtcaggtgtgggagggcgacggggcgtggtctcaccgcagccaacaaatgacaactcttgcagaccgagcctcttctctccccggacctttgctcaggaatctaccagcattaaacctttgagctaggtactattatatcaccgtcttacagatgaggaaactgagacccagagaggcacagggacccgccgcaggtcacacatccagtaaggggcaaatatggcgtttgaaccctacagagttccccagttaaccaccacagggcttctgggagtggtggaagtatgtgggatttggggttttctcgtgcagagctgcccggcccgagaaggtgtttaacgttttacagtcgtcttgattgcccagtgatagtgagaggccctgctatctaggaaaggatccatttccccagatcaatgttcattacccgcctaactgccctttttccccaggaggcccagggcaggtcggctccccagccacccaccaggcaggcctggcacatgcagcaccccaccccaccctcaccccctctccgtttgcagcagtttgcaagatgagtgtgttgtacctatcagtttatttatttgtttatttactttttgagatagagtttcacccaggctggagtgcagtggcgcgatctccgctcactgcaacctctgcctcccggattcaagcagttttcctgcctcagcctcccgaatagctgggattatcggcaggcgccaccacgcccagctaatttttttgttttttgtttgtttgtttgtttgttttgagacggagtcttgctctgtcgcccaggctggagtgcagtggcacgatctcggctcactgtaagctctgcctcccgggttcacgccattctcctggctcagcctcccgagtagctgggactacaggcgcccgccaccacacccggctaattttttatgtttttagtagagacggggtttcaccgtgttagccaggatggtcttgatctcctgacctcgtggtccccctgcctcggcctcccaaagtttttgtttttttttttttttttttttttttttttttctttttttgagacggagtctcgctctgtcgcccaggccggactgcggactgcagtggcgcaatctcggctcactgcaagctccgcttcccgggttcacgccattctcctgcctcagcctcccgagtagctgggactacaggcgcccgccaccgcgcccggctaattttttgtatttttagtagagacggggtttcaccttgttagccaggatggtctcgatctcctgacctcatgatccacccgcctcggcctcccaaagtgctgggattacaggcgtgagccaccgcgcccggccttgtatttttagtagaaacgggatttcgccatgttggccaggctggtctagaactgagaccactgcgcctggcctgcttatcagtttagattggccctctccatggaccctctcctccttccagacactctgggctcagtcaccgaagggagcagcagcaagaagaatatttaccagcaagtactgaatcaacatgtgctgccagccagcgctgacatgtatctttgttgactgcttaaggtattattacccccattttacagataaggaaagtgaggtgggtacaggaatctgtctagagtcataaacctagtgagtagcagaccagaattagaacgctccagaattagagtatcttgattccagagtcgtatgtatatgtgtatgtgaatatatgtatatgaatgtgcaatcatatgtatatgtctgtatatgtgtatatttacacatactttaaaaattgacatagaggccaggtgtggtggctcacgcctgtaatcctagcactttgggaggctgaggccagcggattacctgaggtcaggagttcgagaccagcctgggcaacatggtgaaaccccgtctctactaaaaatataacaaaattatccaggcgtggtagcacacgcctgtaatcccagctactcgggaggctgaggcatgagaatcacttgaacccaggaggcggaggctgcagtgagccgagattgcgccactgcactccagcctgggcgacagagtgagactctgtctcagaaaacaaaaacaaaaaagtcaacatagagcactggacaaacccatgtaaccagcacccagatcccaatcagaacattccagcccccgtagaagcgcccctgttatttttctcgactgctttctattcccttgagtgaacattccacaagtcattgacccattctacagctgacagacatttacgctgtttccagtttaaagacattacgaatgaggccaggcgccatggcttacgcctgtaatcctagcactttgggaggccaaggcgggtggatcacgaggtcaagagatccagaccatcctggctacaaaaaattagccgggcgcggtggctggcgtctgtagtcccagctgctcgggaggctgaggcaggagaatggcgtaaacctgggaagcggagcttgcagtgagccaagattgcaccactgcactccagcctgcgtgacagagtgagactctgtctcaacaaaaaaaaaaaaaaaaaaaaaagacattatgaatgaagctgctatgaacattctttttattatgataacatctacataacgaaatttaccattttaaccacttttaatagatttccttttttttaagatcagttttaggctcacagcaaaattgagtagcaagtatagccacagcacacacagcctcccccaccatcaccatcccacacgagccagtacatttgttatggtcagtgaacccacactgacacctcattatcatccaaagctggcagtttacattaggattcatatattctatagtttttggctgggcgcagtggctcacacctgtaatcccagcactttgggaggtcgaggtgggcagatcgcttgaactcaggagttcgagaccagcctggtcaacatggcaaaatcccgtctctatgaaaaatacgaaaattagctggttgtggtggcacacctatgatcccagctactcaggaggctgaggtgggagaatcacttgaacctgggaagcagaggttgcatgggcagaggtcatgctgctgaaccccagcctgggtgacagaatgagaccctgtctcaaaaaaatcattaaaaattaaataaacatattctatagtttttttgttgtttttgtttgtttttgattttttttttttttttttttgagatggagtctcactctgtcgcccaggctggactgcagtggcatgatctcagctcactgcatcttccacctcctgggttcaagcgattttcctgcctcagcctcctgagtagctgggattacaggggtgtgccaccacacttggctaatttttttttatatttttggtagagacagggtttcaccatattggccaggctggtctcgaactcctgacctcaggtgatccacccgccttggcctcccaaagtgctgggattacaggcctatagtttttgacaaatgtatgtggcatgcatctaccattacagtatcatatggagtagtttcactgccctaaaaatcctctgtgccctgcctactcaccccttccttctcactaacccttggcaaacactgatctttgtactgtctccaccgttttgccttttccagaatgtcatatggtaggaatcatacagtagggagctttttcagattgcttccttctcttaggaatgtgcattgaaggttcctccgtgccttttcatggcttgatagctcatttcattttagcactgaataatattctgttgtctgggtgtaccacagtgcatccattcacctgctgaacgacatcatagttgcttccaagtttaggcaattacgaataaagctttattttattttatttttgtttatgttttagtcgataaatcattttacatgctcatggggtatgtagtgatgtttcaatacatataatgcatagtgatcagatcagggtcatgagcatatatatcatctcaaacatctatcatttcttcgtgttggaaacattcaatagaataaagcttccaggctgggtgtggtggctcacacctgtaatcccagcactttgggaggccgaggcaggtggatcacctgaggtcaggagttctagaccagcctggccaatatggtgaaacttcatctctaccaaaaatacaaaaattagccaggcgtggtggcatgcgcctgtaatcccagctacttgggaggctgaggcaggagagtcactggagcctaggaggtgggggttgcagtgagccgagatcacaccactgccctgcagcctgggtgacagagcaagagttcatctcaaataaataaataaataaattagccgggcatggtggcaggcttctgtaatcccagctgatcgggaggctgaggcaggagaatcacttgaccccgggaggcggaggttgcagtgagctgagttcatgccattgcactccagcctgggagacagagtgagactccatctcgaaagtaataatgataaagcttctataaacatctgtggacaggtgtttctgtagacgtaaatttttacttcctctgggtaaatatcacagagtgtgattgcctgatcatgtagtaagagcatagttagttttataaaaaaacctgccgaactgccttcctccctagctggactgttttgcattcccagcagcaatgaatgagagtccctgttgttcctcatcgctgacagcatttggtgttgtcagtgttccagatctcagctattctagtgtgtgtgtattgatatcacattgctgttttaatttgcatttcctttatggcatatggcatggagtgttttttctttctctttttttttttttttgagacagggtctctgtcgcccaggctggagttcagtggtatggacacagctcattgcagcctcaacatcccaggttcaagcaatcctcccacctcagcctcctgagtagctgggactacaggcatgtgccaccacacccagctaattttttaaattgtttgtagcaactgggtcccactgtgttgcccgggctgggttcaagtgatcctgccaccttggcctcccaaagtgctgggattacaggcataagccacattgcctggacttccttttgtaataatagctttattgagatacactgtacataccatacaattcaccaaattaaagtttacaattcaagagtttttagtatattcacagagttgtgcaaccatcactacaatcaacttttagaacattcctcacccaaaaagacaccgtatccattagcagtcactcacacaatggttcttagtccaagtttaccagagccagtctctgtgactaggctggggatgcaaatgggaccactcaagccagttggctgccacatggcagccgggggcgggggggtggaaaggatgctgggaaggcagtgactggtggcccactcacctgtgcctcacctgtttcaccctccccttgtcacaaggctgacagcctcctgcagtgcacctgacattgcagcttaccttccccgcctcaccaagctctcattctaagattgtttcaagtgcaaggagagtgggccagatatgtgaaagggacgcagtggccaggatttgagaagcccatccttggcagaggtgacaagctatgcaaaggtacagagaggccgggtgcggtggctgatgcttgtaatcccagcaccgtgggaggccaaggtgggtggatcacctgaagtcaggagtttgagaccagcctggccaacatggcaaaaccccatctctactaaaagtacaaaagtcagccgggcgtgttggtacatgcttgcaatcccaactactcgggaggctgtggtgggaagaatgcttgaacccaggaggtggaggctgcagtgagcctgggtgtcagagcaagactccatctcaaaaaaaaaaaaaaaaaaaaaggtacagaggaatgagagactggagagcttgcaaacttgatcgctggaaagcaacatccatgtgaagaaatagcatgtgatgaggccgaattgtttctgtccgtttcacatttctgacagctcctgttgatttttgctatactatgctaatagttacataaaggttcagtcatcccatctctcctaaaaataatccttgttctcctttactgaaagtttatcacatgccaggggctgccctcactggccttgtcacattttacctttacctgatgcagtcgatatctttattaccccatttctctgatgagaaaacaggctcagataggcaaagtcacctctttaaggtcacacagcataaatgacagagcccagctctgagtgactcctgctttttggacagtccatccaagatatcgtcttcaagtacaattagatatttgcctttgtttttgcaccaatagtaacatggttcaactttattctctccttggtttttactcaatacatttaggaggtcattccatacctttatataactctatgtcttctatttttttttttctggctacagagtattctgttgaacaggtgttctctaattatttggccagttccctatggaagggtatttaggttatttccagacttttgctactgtagtaactacctttaagctagtaccttagctcccttgcacaagtctatctgtagaggaaattccttctgggttaaaaaaaaacatagtgttgtaagttctgaacaaattcccctctaaagaagctgtcccaccaagtagcagaggacatttccaattcagagagtgctccaaaaagcctctgttcagggctgggcacacatggctcacgactctaatcccagcagtttggaaggccaaggagggcagatcacttgaggtcaggagtttgagaccagcctggccaacatggctaaaccccatctctactaaaaatacaaaaattagccaggcgtggtagcggacacctgtaatcccatctacctgggaagctgaggcaggagaatcacttgaagctgggaagcagaggctgcagtgagctgagaactcgccactgcactccatcctggagtctctgtctcaggaaaaaacaaagcctctgatcagaggatccagggatgtgggcagttctagccccacctgctgcccctctgggccgtaagtccactcccccacccacttcccacggttcaggccacatggacccttttctggtcctcaagtggccaagttggttcccacctcagagcctttgaacttgcaggccttagcgtaggatgttcctccctccccgtggctcacgccttctcacctttcacttacacaattttatttattttactgcatccagtacctgaatggccttatgcacttacttgctgatgttctgtccccttcacgccatgaaggctgggagttttctgtcttttcacacacagctgtgttcccagcacctggcagtcactgaggacatatcgctgcctcccctctccaatgccccgaatccctgatcttgcaccaattttctccgtaaaatgtattcccttccaatatatctcatttgcttatatgtgttgtctgacaccctcactagaatgtcagctccagaagggcaaggatcttgttttgttaattgtttaatttcaaatgcttaaaagggcatatggcacgccgtaggcactggataaatatctgttgggtgaacgaatgaaagaataagtgaatgaatgaggaccataacccaccctcctggactggctggctgtccctccagggaaaaaggccagttaaaaagctggcctccttcaggtgaaaccatttccgtcccctcaggatgggcccgtggctccaggtggaggccagcacgcagtgtggagggcctggttggccagatgtgggaggagtttgccacaggtgagcaggtggccagctgtggccccgcccccaggaggcccgtccccacccggaggcttcgccagccccctcctcgggggccccgccccgtccaggaaagcccgcccactcctcctgaggccccgcccctcccgggaggctccgccggtccctgccccaggatccccgccccctccgtcactgaggccccgccccgtccatcagcctgtctcaacgcacgccagtctcagctccgaccttgcagcggcgcagcgcgggtgggaggcggggaggagcagcgggaagagcggagcgaggaccgcgtccggcgcagtcttcaatgagcagcgcggaaactgcaccccagacccgagcctgctgcgcgccccctcccagagctcacctggtgccaggtaacaggtaagggcaaggcaccctagacccctggttttgggacctttccaggccagggtgccaggccaggcacgcgttggggggcgtctgggcacccctgcctcggtgggaataggcatctcggttgaaggtgggagcctccctggagccctcccggagcccgcagccgcagctcccagcccccatccctgcagcatcctttccgcgcccgtagggcgaatgttgccattttttttaacccccaaggcgccgctgcctcttggaaaatgtgggaggtgttggaggatcctgggatggctgtcgttcccccaggacggggctggcgcgccttctgagggctcccactgtccatgtcagggcttcccagggatcctgagcaccagggctttggcagaagcctgggggatctggcctgttcctgctgacctgggcaaagcccttttctcagtctcctcagcaggccagtgggctgccgctgctccccgccatccacgctggcagtgaggcctgtaggttcccaggggagcctcttttatttctgggcctctggaaaaaaaaaaaaagcctcctcccccggcctgacattaactgagacagctttaagctgggctgacaggatccccgcctctgcccattccccttttccggatagtgcagggccgggtgacaagaggaggcttggagggagggcacctcgcgcctctctgcctctcctagagctgagagcacctgagacagcttctcaagtcccagagtgaggctgggccccacgtgggctgccagaggctcagcagggatgaaatcaggatggacccacgcagacccagcccgctcctgccccagagccagggacccccacagtcaggccctcccacccagcaggcctctgtcagtcagtgctttgctgcgcagcgaatggaatgggcttatctgggtctgggcccacaccggggtaaaaagctcaccatgtcaggggtgaaccgaggccactgggccacccaagttctttggccccttttcttgcaatccctgaatagcctggacaggggacccccgagtctccatcctggagaccctggatgcgggtctccatcctgccttcgtcctttttctgcgtgtcacttaacctcttctgtctccccagctgtaaaacgaagctgatgaccacagggtcctcccagggaagtggggaggcctggctgctttgggaggtgccaggcacatagtagggcccggtgaagggtctctgttgcagtgtcataataacttttatctattgtctcctggccttctctgcaaagggtctctgttgcagcgtcataataactgctatctatcgtcttctggccttctctgcagctgatgcctagagataccccaaccaatgtctcctaccctgggaagaaaagcctttgacaagacccctggtggggacaaggccacttgcttatcctgtgccattctttagtgcacggagtcagggcgagccacccctgtcttcctgggccttgtccggttctgggtggggcctattctggccaccaccttgtccttgtccctcaggccaagcaggtcacccatgtgctcacaatttgccctccagctccacctggccgagcccagcgcatcctctgagtcaggcagttggagagcggtgacaggcctctaagcagccttggctggtggtcacgcttctgcccagtagctttaaaaataacggagtaactgtccccaccgaggactgtaacccgacccggggctggagtccactctgctaggagtctgtggtagaaggactagtgcttgggggcagggacccaggtgctagcactgctctgccccagcctggtggatgacctgagacaagcctcaccccctccctctgtgggcctcagtttccccatctgcaaaatgtggctttggtagtctgcgatatgagtgtttgaaattttgtttattctgatgaagataaataggcttctggaggcggggggcatgactggtaccctgggctgttgggggatggggaaggaattcccccagaggctgggagtcaggttgggagagtcagccaagcccctgggctgctgtccaggttttgagtctcttgcggatctgcctcctgttccacttctgagcccgagcccctttctggggactgagggaccccatgtgcccaccacgaggagagcagcagctgaggcggctggcagcacctggtgcagccggcagtggcttggctgggaggcctggaatggcaccaggccaggagcttccctccctgggctctgactggagctcacccactcgctcgctccccacggcctctgcattgcagcagacaggagcctgcgtgggcagcacaggcagggctggggagggagccaggacctgggctgagggtgtccgaccatcctacccacttccccttgcccttgaccctgcttggccctgaccgtctttggaggggcagctgctgactaagcaactgtcatctctgcgatgggcttcggtgtgcctggaggtgtgggggtgaaagcagggcccaggcttggaggttgttatatccccccactccattccccctctgcatctcagaccccttctcagcattagtaggggttgtgcctacctcctggagaggctgttttgaagggttggagctatggagttgagagtacagattttggaactggacggccagggttcacatcccagcttgtgacccaactctgtgggtcacctagctctgtgacccagggcaggtcacttaatctctctgttcctcagttttcctaactgtaaaatggggataatgataggacctacttcatagggctctggtgagtgctgacgcatgtaagtgcctggagccaatgtcagctggcaccagctgctgtcattgccagcaattagcctcagcagtcttatcacctctgccacacggcccagccctctgctggggacccttttccttagatgaacacttcccggtagcattttccttcactctgtcacccaggctggagtgcagtggcgcaatctcggctcaccgcaacctccacctcccagtttcaagtgattcttctgcctcagcctcctgagttgctggggttacaggcgtgcaccaccatgctcggctaatttttgtatttttagtagagacgggatttcgccatgttgcccaggctggaatcgaactcgtgagctcaagctgttgcccatcttggcctcccaagaggcccagatgggattacaggtgtgagccaccatgcctggcccctggtagcattttctatattgaatgttatcttagtttaggggtgaagaacacagattctgggctcagacacctatgaatccacatcccagctctgctattcagaagctgtgtaatcttgggcaaattcttcacttctctgggcctcagtttctccatctgttaagtggaagggatgacagtgcacatctcacaaagttgctgtgaggattaaataggtggggccacctggatttgaagcacatggtgcagggcagggctcacaggaagtgcagtgttacatccctgtctgcttgtagttattagacaactgctttgtgccaggcatgcagtagacaggtggagaggcagatgctggggtcctacactcactgactgcctcaagtcatcctggcttgggcccttgttggctgaatgtctggatcaggtggttttgtctctctgtgcctcagtttccctaactgtaaacgggaatatggaaaccctggcctcgtgggactgtgtgaggttccagtcatgccacagtgtgagcggtttgggcacctgggcgccagagcttcggggagaggatctctctcaggatggccccttcccagccacgacagtcatccccgctgtcacccagcgcctcacccctcctcttgggggatctagagcccagcccattttgcagatatgacaacaaaaggcccacgggaggaaggactggagctgagacaggaggtagcacccagggacacaccccagcccggtcctaaccctaccgtggacaagccccactcacaaactcaggcctccaggcccacttcccgggtgtccctgcggctctgggggagtcctgagggacccagtgccgggagatgccttggataaagcagacatcaagattcagaaaaccaaaggggcctagggctgggcacgagggccaacctgggcaggaggaaaagattctggaaacttccaagcagatgccaaggtttctggattgctgtgtggcctgcaagccacccccacagctgtcaagttccctcttagaccaaaatagtttatttggggttgcagagatagaaggcctgacgtgggaggagaaaagtggacaaacatttattaagcacacactgtatatggttgattacaatcagcagcaattatgcaccaggcactctgcccagaactgacacattgaacctcacactcacattttgcaaatgaggaaacaggttcagagaaatgagtagtggtagtaaagacagcggctgtttattaaactctgcttatctcagcttcgtcctcactatggatgcaaaatcctccagatactccccaccctctctgatctcatggggccttgctgccttcccaaggggcactcctgccttggggctctggcactgtttcacctgtgccaagtgcttttccccagatagccacttggcagacttccataactctttcaagtcttgctcaagtgttacctacccagcgaggtcttctctggccccctatttaaaattgatctctggccccgcacagtggctcacgcttttgatcccagactttgggttactgaggcatgtggatcacttgaggtcaggagtttgagaacagcctggccaacatggtgaaaccccgtctctactaaaaaaaatacaaaaagttagctggtcatggtggtggggtacctgtagtcccagctacttggggggctgaggcaggagaatcgcttgaaccagggagacggaggttgcggtgagccgggatcgcaccactgtactccagcctgggcgacagagcaagactctgtctcaaataaataaataaataaaataaaattgatctctgtcttcccccacccctatcctattcaccctcaccccatcctatttacccccctcttttttccaccacaacccttatctctttttttaattaaaaaaaatttttttttttagagataggatcttgctgtcaccagggctggagtgtagtggcatgatcatagctcactgtggcctcgaactcccaggctgaagaagcgatcctcccatcttggcctcccaagtagcttggactacaggagcatgctaccacactcagttaatgtttgtttgtttgtttgtttgtttgctttttaaagacagggtctcaccctgttgcccaggctgctctccaactcctggcctcaagggatcctccaaccttggcctcacaagacacacattatttccttattatcttttttttttttttttgagatggagtctcgctctgtcacccagctaaattttgtatttttagtagagatgggggtttcaccatgttggccaggctggtcttcaactcctgacctcaggtgatccacctacctcggcctcccaaagtgctgggattacaggcgtgagcccatttccttattatctgtctcctgcatgagtatgtcatctccaggagagcagggatctttgttctttttgttcatgacaaagaacaaagaacagcacctggccgcagtgggcactcagtaagtatcccttgaatgagtggaatcttagtacccgggaagttgatattgccattttacagatgagaaaactaaggctcagagatgtcaagtgactttctcaaggtcacacagccagcgagtggcaaacctgaaccccttgtgctgatgtttgctgttgtccctacaggcctggcctcgccctgtggatgatgatggccttgcccccgtgagctacaacctggccttcagcacccgcccacctccaaccagcaggatgcggctgtggaaggcggtggtggtgactttggccttcatgagtgtggacatctgcgtgaccacggccatctatgtcttcagccacctggaccgcagcctcctggaggacatccgccacttcaacatctttgactcggtgctggatctctgggcagcctgcctgtaccgcagctgcctgctgctgggagccaccattggtgtggccaagaacagtgcgctggggccccggcggctgcgggcctcgtggctggtcatcaccctcgtgtgcctcttcgtgggcatctatgccatggtgaagctgctgctcttctcagaggtgcgcaggcccatccgggacccctggttttgggccctgttcgtgtggacgtacatttcactcggcgcatccttcctgctctggtggctgctgtccaccgtgcggccaggcacccaggccctggagccaggggcggccaccgaggctgagggcttccctgggagcggccggccaccgcccgagcaggcgtctggggccacgctgcagaagctgctctcctacaccaagcccgacgtggccttcctcgtggccgcctccttcttcctcatcgtggcagctctgggtaagtaaggacctcggggacatgtggccaccagaacatcaaattaggtggatatgactgccttagattttaaaagattttacttacgtggttcagacatcaaattgatatgaaaaggaaaagaggccaggcatagtggctcatatctataatcccagcactttgggaggctgaggtaggaagatcacttgagcccaggagttgaaaaccagcctgggcaacatagcgagaacccatttctattttatttatttatttatttattgtatttatttattttttcgaaacatagtattgctctgtcacctaggctagagtgcagtggcacaatctcaggtcactgcaacctctgcctcccagcttcaagtgattctcctgcctcagcctctcaagtagctgggactacaggcatatgccaccacacccaactaatttttgtatttttagtagaaacaggttttcgccatgttggccaggctggtcttgaactcctgacctcaggtgatccactggcctcggcctcccaaagtgctgggattacaggcgtgagccacggtgcctgccccatttctattttatgtaatttaaaacgaaaaaataggccaggcgcggtggctcacgcctgtaatcccagcactttgggaggccaaggtgggaagattgcctgagcccaggagttcaagaccagcctgggcaatatgacaagaccccatctcaatttaaaaaaggaaaaagtaaaagacaagagaagaaaaaggaaactatgagttccactcctgtttttttctttttttagacagggtctcactctgttgcccaggctgtagtgcagtggcatgatcacagcttacggcagcttcaacctcccaggctcaagtaatccccccacctcagtcttccaaatagctgggactacaggggcgtgcaccacacccagctaattaaaaaaagaaaaatttgtaaagataggatctcactatgttgtccaggctgatctcgaactcctgggctcaagtgatcctcccaccttggcctctcaaagcactgggattacaggcgcaagccacaatgcctggctgtgtttcacttctaattctaccctgatcattctgcccagggctaactgcaggaaaaggacccagaaactcccaggtggccaggaaagcattctttcttactcaattcttgtgcatgttcccagcttttccttatgcagctacaagcacatcaaaagaacatgcatcactcccccacctctcacccacattgttttatgttttgctcttttcacttaacaatatgttctggaatttttccaaccagtacctcattgttttatttggcttcataatattccattgtgcggctataccatagattatttagttggtctcccatcatttgactcttgggttattttgagccttttcctcttaacatgaattttttttttttttttttttttgagatggagtcttgctctgtcacccaggctggaatgcagtggtgcgatcttggctcaccgcaacctccatctcctgggttcaagcgattctcctgcctcagccacccaagcagctgggattacaggcgcctgccaccacgtctggctaatttttgtatttttagtagagacagggtttcaccatgttggccaggctagtctcaaactcctgagttcaagcgatctgcctgccttggcctcccaaggtgctgggattacaggcatgagccactgcgcccgacctgcacgtcaataattctgttcatacacatttcatatgaatgtggatggatctgtagaataaattcctggagctgggatcatcagagaatagactagaaaacatcagagtgggcaggcatggtggctcatgcctgtaatcccagcgctttgggaggccgaggcaggcagataacgaaaaaaaaaaaaaactctcagcagtttgagaccaaaaaaaaaaaaaaaagatattaatattttagttgtgtgtgcctacgtgcaggtgtggcctggtttgtgacatgaaatgtatttgtgcctgtgagtctggtccaaacagtttgaaggcaccactcagcaacatgggtgggaaggtggcactgcatggttggagctcacaggttctgggggcaacgaggcctgggcacaaatccctgtcctgctccctacccagccgagtggccctgcgtaagttctccagcctttctgagcctcacttccctcctctgtgcaacaaggattgttggagtccttatttcctgacattttagatgctgaaaagaacgggagagctgggtgcagtggctcatgtctaatcccagcactttgggagaccaaggctacaggatcacttgagcccaggagtttgagaccactctgggcaacacagcaggaccctgtctctaaaagaaatgtttttttaattagctgggcatggtggtacttgcctatagtcccagctactcaggaggctaaggtgggaggatcccttgagctcaggagcttgagttatagtgagccatgatgacgccactgccctccagcccgggcaacagagcaagacctgtctctaccaaagaaaaaaaaaaaaataggagaaggactaagtacagagcttggcttgtcatggtaagtgctcagggttgttagctattatgagttttaaaaattttaagctgggcgcggtggctcatgcctgtaatcccaacactttgggaggccgaggtgggcagatcacttgaggtcaggagtttgagacgagcctggccaacatggtgaaaccccgtctctgctaaaagatatataaatattagccgggcacagtggctcatgcctataatcccagcactttgggaggccgaggcaagtggatcacctgaggtcaggagttcgagaccagcctggcaacatggtgaaaccccatgtctactaaaaatataaaacttagccagatgtgctggcatacgcctgtaattccagctatttgggaggctgaggcaggagaattgcttgaacctgggaggcagaggttgcagtgagccaagctcacacaactgcactccagcctgagtgacaaagtgagactccatctcaaaaaacataaataataaaatagtaaaataaaaatgttaactgacagagacagagcctagagaggtgacaatgcaataacaatgccagaatgttctgagagaggacaggcaaacccagagctggccctgactctgcagccctgtactcctacgatctacctctgccctctcagtcccatctcctcaacatctgtgtgaggttaggcaagttatttaacccctctaagtcttagcctcctcttctgtgacatgggcatagtagtacccctccaatggggttggaaaggtcagtgaatccacatgggtgagacaccttggacagctcctggcacatagacacctcccagtaatactagcaggtgtgaggactgggatgaccccttcccattaaaccaggcagtttctcctggctcatgctgggcggcccaaaagtcccctccttaggaagccaccttagattctgccaactgtggtaactttgtctgcacctcagttatagcttttatgacataaaaatcatatgttcaggctgggtacggtggctcacacctataatcccagaactctggggagctgaggcctgcagatcacctgaggttaggagttcgagactagcctggacaatatggcaaaaccccgtctctactaaaactacaaaaattagctgggcatggtggcagccgcctgtaatcccagctactcagaaggctgatgcaggaggatatcttgaacccaggaggtggaggctgcagttagctgggattgtgccacagcactccagcctaggcaacaaagtgagactccgtctcaaaaaaaaaaaaaacaaaaaaacaaaaacccaaaaaactatgcatttatgctgggcacagtggctcatgcctacaatgccagtactttgggagtctgaggcaggaggatcacttgaggccaggagttcaagaccagtctggccaacatagcaagaccctgttatgtatgcattcaccctcctgcctcccctcccaggtcctgagcccctcaggggcaggggccaggtctgactcaccctggatcccagtagctggcacagagatgggctcactgaatgaataaatgaacaaaagtatgaatgactgtcatgcctgtgcagacagatggtgccccatgccatgaccttgtttacccgacctgctggggccctgccgtcagctgctgtgtggtcggggaatgcagacatccttaaatactgctgagcagattttcccggcttgcaggattgcatcaagagtcagggcgcagactcgaggctcaggctcccgacttcactgataactttaggcaagttattaacctggccaacgctcacttgaccattctgaagtgagggctttcttggggtactgtgagaaagaagtgagaggaagcttggtgcctagcacaagtaaatacttaatcagtgttagggccaggtgcaatgccatgtacctgtgaccgcagctacttgggtggccaaggagggagggttgctttggcttaggagtttgagaccaacctgggcaacatagcgagaccccatctcaaaaaagacaattaggtactgtgattattaataattatttttcaatcaacaagcattcagcagtgcccagcttttctgtaccctcagaatcttaaaacaaacaaacaaaaacaaaaaacaaaaaaccacccattgggaaatgttagttttagggttgagtatctcttattaaattaaggttctttagaggccaagtgcagcagctcacacctataatcccagcactttggaaggctgaggtgggcagatcacttgaggtcaggagttcaagactagcttggccaacatggtgaaactccgtctctactaaaaatacaaaaatcagccgggcgtggtggcacacgcctgtaatcccagctgctcagaaggctgaggcaggagaattgcttgaacctgggaggtggaggttgcagtgagctgatatcgtgccactgcactccagcctgggtgacggaatgagactctgtctcaaaaaataaaaaataggccgggcacggtggctcacacctgtaatctcagcaagggggggcagatcacctgaggtcaggagttcgagaccagcctgaccaacatggagaaaccccgtctctactaaaaatacaaaattagctaggtgtggtggcgcatgcctgtaatcccagctactcgggaggctgaggcaggagaatcgcttgaacccaggaggcagaggttgctgtgagtggagatcgcaccattgcatcgcagcctgggcaacaagagtgaaactccgtctcaaaaaaaataaaaaaaatacataaaaaacaaatggagtccttttttttttttttgaggcagggcctccctctgtcacccaggctggatggagtacagtggagtgatcacagcgacttcagccttgacctctccagctcaagtgatcctcccacctcggcctcccaaagtgctgggattgcaggtgtgagctaccttctgtagcctaagattctttaatatggatttcatggcaaaccaaatgtataaacttgggcaagtgacttaatctctctgagcctcagtttcctcttttgtgtaaagaatacatttccacaaatggaaggaataattgtaccaaacctataggattactgggtggcctttgagacttaagaaggtaggggagcagatatctggggtaagtggctgggtgtggtggctcacacctgtaatcccagcattttggaaggccgaggcgggcagatcacttgaggtcaagagttcaagaccagcctgggcaacatggtgaaaccctgtctctaataaaaatataaaatttaggccaggtgcgatggctcatgcctgtaatcccagcactttgggaggccaaggcaggtggatcacgaggtcaggagttcaagatcagccaggccaacatggtgaaaccccatctctactaaaaatacaaaaattagccaggtgcaatggcaggtgtctgtaatcccagctactcgggaggctgaggcaggacaatcacttgaacccaggtggcagaggttacagcgagctgaaatcgtgccaatacactccagcctgggcgacggagtgcgactccatctcaaaatatatatatacatatataaaatttagccgggtgtgatggcggtcacctgtaatctcagctacttgggaggctgaggcatgagaatcacttgaacccaggaagtggaggttgcagtgagctgagatcatgccactgcactccagcctgggtaacagactgagactccatctcaaaaaaaaaaaaaaatgtatgtggtaagagcactccaggcagaaggactagcccatgcaaaggtcctgaggcaggaaggtgcccagttgttcaagagcagacaccagttagctggagcagagggagtgagatggggcggggagaagacaaaggtctctgctagcggctcaatcatgcaggtccttgtgggctattgtaaagactttggcttttaccatctcactggatgagaagggggatttggactgttttgagccaaggagcaacaagatctgaagttagttccaacaggatcctgccttctactgtgtggacaggctgatgtgagcaaagttgagagcaggctactgagatagtcccagtgaggttaatgacttggaccagggttggggcagtagaggcagtgaaagtggtcaggttctggaaatggtctgagtatttgctggtgcattggagagtttcacgtaattcttgtgcagattcagcaagagagtttgccggcatgctttgcacagcccctggtacccagtaaggcgattattagcattggtgcttgctggaatcagatattccagaatattctgtcacagctcatcgttgccctcttcttttctgtgggtaaactgaggcagaaactcaggctgggtggaactctgcagcctcagctggagacctcgtctggccaaggactgtggggacacaggccctctaggctgccacctcatggtcccagcagagggcaccagaactgcacagaaagtctcactacccaagtgtctgagccaggccagactgtgctagccagacctgcccggggttcattcactgacctttattgagcacctactgtatgcccagccccaaacctggctctgctcatggaaagaacttcagtggaaacaggtcctgggatgaacaagggcctggcctggcctggtgatgccactatttccttaagaggagagtggacattccggattattgtcgggggagtctcatttctgctgctgtaacaaaataccacagactgggtcatttagaaaccatagaaactgatttcgtactgttctagaggctgggaagtcccagatcaaggtgccagcaggtttggtgtcgtgagggccactctctgcttccaagatggtccctccttgctgtgtcctctggaggggaagactgctgtgtcctcacgctgcagaaggtggaagggcgagagatggcaaaccaggcttacaagccctttgaaaagggccctcatcccatcctggagagctctgccctatcacattggcgattatgtttcaatatgtaaattttgggagatgcattcagaccacaggaggaagggaaaagaaagagcccccaggttgaaagccagtttaggtttgagtcccagcctttccccttgctgtgtgacctggagtaaattcctcagcctctgtgagtctcccattccaccccaggattgttgtgaaaacacagtaaggcaagcgggtaagaaagcacccagcaaggtgtcaagtgccccaccaggaggggtggggtggcaatttccagcattgcttggaaccagaatagcaacgtcttctgaggttccagaatttggactctgaacccattgagaagaatgaaatcaactttggcgtcaatcagccactgattgccatgtggcctggacgagtcatctcattcaacttcactttcagccggacgctgtgactcaggcctgtaaccccagcactttgggaagctgaggtgggtggatcgcttgagcccaggagttagagaccagcctgggcaacctagcgaaacctcgtctctacaaaaaaatacaaaaaattagctaggcctggtggcgtgtgcctgtagtcccggctactcaggagtctgaggtgggaagatccactgagcccaggaggttgaggctgcactccagcctgggcgacaggagtgaaaccctgtctcaaaaagttaaaaaaaaaaaaaaaaaggaaaatattttagaaaaagaaaaacaaattaatttttctcatttgtaaaatgggggtgattccagggcctgctccaaagggaatgaaacaaagttcaggagcggtggctcatacctataatcccagtactttgggaggccaaggtaggaggattgcttcaacccaggaggttgagaccagcttgggccacatagtgagacccctgtctctacaaaaaaaaaaaaaaaaaaattagcctggcatggtggcacatgcctgtattccctactcaggaggctgagacaggaggatcacctgagcccaggagtttgatgctgcagtgagctatgattacaccactgcactccagcccgggggacacagcgagaccctgtctcaaaaaacaagagaatgaagcatcctgcaggagccctggctcgatgcctggtagccactataaataaagaagaaccagcaggctgtgtggatgcaaggcccagtgctcccctgttctctgaggaggggggcattaagcaccctggggccccacgatgggcagcaagagtttgccgagggaggaaagcccaccggtggagtgggcagaggggttggtgtgtggacttctggagcctcaggaggaagggtgcgggttcccctggctgcagacgtccctgaggctgccctgcctcccccaggagagaccttcctgccctactacacgggccgcgccattgatggcatcgtcatccagaaaagcatggatcagttcagcacggctgtcgtcatcgtgtgcctgctggccattggcaggtagctggctcaacccccacgccctgccccgcacaccccgacctgcaccagggagggaagggagggcctgttcctaaggaagacaggggccagggaggccctggaaatgcccctggtgggcctgtccctcagctggtcaccctgggaaccggcttccacactgtcttagagcaccctagaaccacaccctctggtccctgaaaagggcttcagtcctcagggttccctgctcaccctccctggctgttttccaagtaggaatctggtcccaaacagaaccggctttgtctgagctgttctggaaggaagagggtctggctggcacatttgggtctcttgtcccacaactgtcccctttgccctcaccttgaggggggctcccactgggaatgagggggaccccgcagggatgccagccctggagtggggctgcggtggggctcccaggcctgccggcagcgggagggggcagccgggtgtggtcactggtctggaaggacatcgtgctataatatctcttatctgcaattagctcatttgccgcaggtattcggggcggcatttttaccctcatatttgccagactgaacattcgccttcgaaactgtctcttccgctcactggtgtcccaggagacaagcttctttgatgagaaccgcacaggttggtccttccagtgccctaggtgtcctgggggctgggccccacccctgtgggcttgcctggcactgaggaatgaaatgggcgtgtgggtggtctcagccctctgtcttctcctcctgctgttagttcaggctgggaacaccctgggcttggcctgtgtcctgggagctggcttgctcactgaggttttggtgtgggctgcggcctctgtggggcccaggccaggccacccgaggtccctgcaggagccaaggccttgctttccattgccccatggaaaccaccaggtccaggactacccacgcctgtggccgacagagaccctgctcccatgggggtcagcaggtgagggccaggggccacaacggggaagacgatagaatatccaccaagatccaagctctgagagacaccggcctgggtcgaagccctggttcctccactcacgaacttcacctctctgatcctctgttttcttgtctgtaaaatgggaacacggatagtagccaccccatggggtccttacacagctcttagcacaatgtccaacttaggtaagaagtgtctgcgctttcctgcccgccaccagccaggttgttatttccctagaagggaagaggagttaccccctctgccagtgacagggaggagacatgggtttgaagtctggctcagtcacggacaggctgtgtgactctacgggggccttcctgttctgagccccagcctcctccgctgtacagcgggatgtcatgaagcttaagcaagatgctgatgactgggattggctcagagtagccctcgaggggtatctgctcttctcccccaccccccaaccccgcccacaggtagggaggcccggcttcccagtgtctgtctcagaggccccttagcatcccccaccgccacccccaaggcccgggttgctgtggtgagagctgagccgcgtgtgttccaggggacctcatctcccgcctgacctcggacaccaccatggtcagcgacctggtctcccagaacatcaatgtcttcctgcggaacacagtcaaggtcacgggcgtggtggtcttcatgttcagcctctcatggcagctctccttggtcaccttcatgggcttccccatcatcatgatggtgtccaacatctacggcaagtactacaaggtaggcctgccctgtctctgctggggactgtgcgccctggcagcccccaaacatccccttaggaggggctcagggggccactaagggctagtgaaggacaggtcttgaggctgtgtttgcattcattcattcatttcttcgctcattcaataaataattattgaccacctgctatgtcccaggcactgggatacatcagtgaaaaagacaaggcccctgccttcctggaacttgtatctagtgtcagagacagatactaggtaccaacagcataaagaatgagaatccacaatacagtaaaagatggtcagtgctaaggagaaacatgaagtgagcagagggattgggagcattgggtgtagctgcaattttaaattggatttactggctgggcccggtggctcatgcctgtaatcccagaactttgggaggcacaggcaggaggaccacttgagcctaggagttcgagacaagattggacaatatagcaagaccccatctctacaaaaaaaaattttttttagttagctgggcttggtggcgcatgcctgtggtcccagctacctgggatgctgaggtggaggatcgcctgagcccaggaggtcgaggctgtagtgagcaatgatcgtgccactatactctagcctgggtgacacagcaagaccctgtctctaaaatgaatgaataaatacaagttaaataggtcttgctgagaaggggacatctgaataagggtctgaaggaggcgggcatcttgggaggtatgtgctgagcagagggcacagccagtgaaaaggccctgggttggaacgtgcctggtgtgtatgtgggggtggtgcgggcccgctgtgatgccatcgcgggcccgctgtgatgccatcatgggcaggctgctgtcccctctggccaccccacggcactgcttctgcttccgagctagggccgtgagccaggtttgacctcaccctcctcctgcttcctgaatgggcgggtgcccccgagccctaagggacagacaggctgggttcagacaggcagggctgtgaccctgtgacaggtacaggcaaccccctcacagtcacccaggcccacgtggggtacttctagagcaggggcttggatgcatgacggcctccaggtggtgccgggtaagtcattgtcgcagctccattggagcctttggtgttggtgacctgagaccagggtagcaaaggaagccatctcccacccagcccccggtgaggccactccccacagtcttctccagccacacaggtaggacctcttcccgaagttcctggtcacgagcctccccaccgtcctcactgagatgagaaagtaaatctattctttagagtctgagccatttctggcacgctgctccccaccccttgcttccggccttcccaccagcccctgggatggagcaagaaaccctggagctccccctcagcccccacctctgtgtgcactgcaggccctgccttttagttcagctaagggaggcctcaggaaggctctgtttgggttttccaccccatgcctgaatgtgttgtgtgtagccagcgagtcatctccacaaaccacacacaccgcccatggccaaacatgactcaggcaccctgcatgcttcctgcggctggggcgtgacacatggtcatgggacatgccagtgcatgctcctgtcctggactctcaggcagccttcctggctggcttgagaatcagcatagtgactcctgcaaagtgtgaacagctccacccaggggcctcttccaggactctggtgaacagcagcctgatggccgcacacttgggaccacttttcagctctgcctgtggtgacatgcacatggtgtgggcagatttcacaacccatggcccctgccaccatgtagaacttggctgggagttctggaatctctttatcaaccctcaggctctaacataatttatgttgatgatgtaaatggtgcccctttaatagttggtgtttcttaaatagtgtacaacctgaacaaccgtccaaggcatcccctgctcttccagcacagggtcaggtgttgaggccccttttctgaaaggattaccaaaaactgtccagtcatgaatagcctcttttgaatactggggatgacttaacgatcagcaccgtgccctatccttcaggagctgaaaccattgccccaagagcctctctggagttgactacctgagtgtgtcaaattgagccagaaggggatgggggagaaagggctagatcttgtctttttgtcctaggaacctcttgcatatagctggtgccagcgaagggtggaaaaacccagagaggcctgggggctccagtacatagtgaggctgttttggggtcttctccttcttgtccccctcctgtccatagaggctctccaaagaggtccagaatgccctggccagagcgagcaacacggcggaggagaccatcagtgccatgaagactgtccggagcttcgccaatgaggaggaggaggcagaggtgtacctgcggaagctgcagcaggtgtacaagctgaacaggaaggaggcagctgcctacatgtactacgtctggggcagcggggtacgtgcccctggccaggcagctctggctgtggagggatgggatgcaaagatgggggaagccctcgatctaggacatcagtcctgcatgttggtgtcaagctggtggagaatctgtctgtctttctttttttttttttttttttttgagacagagcctcactctgtcacccaggctggagtgcagtggcaccatctcagctcactgcaacctccgcctcctgggttcaagcgattctcctgcctcagcctcctgcatagctgggaccacaggcgcccgccaccatgcctggctaatttttgtatttttggtagagacggggtttcactatcttggccaggctggtctcgaactcctgagctcaggtgatccacccgcatcagcctcccaaagtgctgggattacaggcgtgagccaccgcgccctgctgagaatctttcccagaagcaaggctgcccctctcccagtcacctgacgtggggtggcagggtgggagctttcttttcccagctggggaaacatccttgctgaggtggggagtcagcaggtccctaggccactttcgggcaggtctcatgtcacagccacacacactcccgacagtgtctggcacactcccgggagtgcgtcacagcctctccttggaggatggggagcacttggatcatgtcactgctacactggacacacatgggaggtgggcaggtcagggcatagctgcggaggaatgaggagggtttggagtgagagggaggagggagctggtggtctacaggggagccaggggaaagaggatatctgggacttcctggtgctgccacctcccaaaagtatcagccaaggaggagaggaggggctaaggtccagctcagctagctgagcctcttagcaatccgtctgctggcagggggtgcctttgcagcttccaccaaggcacggtggtccagacagcagcctagttctggctgggcatgaggaggacagatggagtccctgactagggtgtgggctgccatgggtactcagactccactcccttcccagatgccccccaggcacaggaggaaggcatgggcgctcccatcacagccccttcttcacggaaccccactgggggaggagacagagagctcactgtgtgaccttagccagggcacttgccctctctgagtcatgctcttccccatgaggaggacgaatagttcccaggtggccaagctgaggagcctgggggtggcatgtgtgtgccaggacctcacaaagaaagccttgttctgtggccaagcccacagcctgctccagctggaggcctctgtagggaaatgctcggggcaggggaaggcatgagtgacaagccttggaagacacccctgccaacggccggcatttcagtttgtggctgggtctgccctcacctccccctgcagcctgggatgggtcagggaatggggatggtgggggatctaaggtcccctcgacccacatcccctctccctctgccccagctcacactgctggtggtccaggtcagcatcctctactacgggggccaccttgtcatctcaggccagatgaccagcggcaacctcatcgccttcatcatctacgagtttgtcctgggagattgtatggaggtgagaggccagtgtgtccggggatccagagagaagggaggagtttggggaagagggatcttaacagggtgggggcggggctccagggactctgacaatgtggtatttctctctaaggtaagtaggggagacagcatgatcatatcaagaatgataatactaggcagggcgtggtggctcacgcctataatcccagaactttgggaggcggaggcgggtggatcacttgaggtcaggagttcgagaccagcctggccaacatggtgaaaccccatctctactgaaaacacaaaaattagccaagcgtgttggtgggtacctgtaatcccagctacttgagaggagaattgcttgaaccctggaggcagaggttgcagtgagctgagatcgcaccactgtactccagcctgggtgacagagcgagactccgtcttgataaataaataggcaagccgagtatggtggcatgtgcctgtaatcccaggtcctcaggaggctgaggctagagaatcgcttgagcctgggaggtcaaggccgcagtgagccgtgatcacgccactgcactccaggctggacgacagagagagaccgtgtctcaaaaagaaagaaagggccaggtgcggtggctcacacctcaggaggccgaggcaggagaatcgcttgaacccgggaggcagaggttacagtgagccaagatcgcgccactgcactccagcctgggcaaccaaagcgaaactccatctcaaaaaaaaaagaaagaaagaatgataatactaccaacaagtgacagcaacaccctttagggacagaggtgatttcagaaaatggtcttaacagctctgtgagaaattgaagtgatgaaaagaaaactgaacctgagcggtggagtgactcgtccatcacatttgctcgggaacggggctcagggccagccgggcctgacttcctcccagcctacttccagcgtagtgcctcggaaatgcaagggtgttttagattgtcttgattttggtttccgcacaagcagatcctgagacagaattggcgtgcaacggatttgtttgggaggtgatctcaggaaacgggggtgggagtggaaagtgagacgtggaaggaaggaagtcagcagagtgagttgtggagccagttaccagtgtgggcaactgaggtgggatccttctagcggacagggtaggacaccagcaccagagtcatcccatctgagggccagggagctggggtgtttacacccaagctgccatcagccattgctcaaggtcagcctggagtgagggtgttaattctcttgtctgcctcgctcccacaaaaaagcccgcagcccgcaggcagtaagagattgggcctttgtgtgctgcgctgacaaaggctcaaggatgttggtggggtgttcctagcatctgctactcaggccattgcatctgctggagaatcacacctgccatattatttgactcagcagtaaatctgcccctaggaatccatgcttcaagagtactcacagcagtgggcgaagatgtatgtccagagatgttcagtgcagtgttgtttatttattatcattactatttgagacagtctcacattgtcacccaggctggggtgcagtggtgctttcatgactcactgcagccttgacctcctggactcaagtgatcttcccaccttagccacttgagtagctggggttacagtcacatgccaccacacccagctaatgtttttctttttaggttttttttttttttttttttgagatggagtcttgctctgtcgcccaggctggagtacagtggtgcaatcttggctcaccgcaacccctgcctcccgggttcaagctattctcctgcctcatcctccccagtagctgggactacaggcatgcaccaccatgcccagctaatttttgtacttttagtacaaaatttagtacaaaattgtattttcagtagaaatggggttgcaccatgttggccaggctgatctcgaacttctgacctcaaatgatccgcctgcctccgcctcccaaagtgctgggattacaggtgtgagccactgtgcccggccagctctggggttttaggtgtttactaccggctgttgctgttgtcttcacagtaacaggacacagatgccgatatcacccccttatcaccaatgaggacattcagcacctaagagcctgaactcaggagacagatgggcctggattcaaatcctggctctgccacttctaggctctgtgacctgggccaagttacttgagccctctgtgcctgagattcctcatcagtaaaaaaggagataatgttagaacctacctcctaacatacagagcatgcttggccggacgcagtggcccacacctgtaatcccagcactttgggaggctgaggcaggcggattccttgagctcagaagttcgagaccagcctgggcaacatggtgcaaccccatttctactgaaaatacaaaaaattaactgggcttagtagtggctcatgcctgtggtcccagctactcaggagtctgaggttggagaattgcttgaacccgggaggcagaagttgcagtgagcaagatcacaccactgcactccagcctgggtaacagagtgagaccctcctctcaaaaaaaataaatagagaatacttaagaaaatgggccgttattatgatttacattcatattctatgtatttttacccaaggagaatatatttatttatagtacacattaagacccattttgaaaattgaaatcaagccatgtctggtgactcatgcctgtaatcccagcactttgggagggtgaggtgggcggatcacttaaggtcaggagtttgagaccagcctggccagtgtggtgaaaccctgtctctactaaaaatacaaatattatctgggcgtggtggcgagtacctgtaatcccagctactctggaggctgaggcaggagaatcacttgacttgggaggcggagggtgcagtgagccaagattgcaccaatgcactccagcctgggcgacagagggagactccatcttaaaaaaaaaaaaaaaaagctatgctatcgcaattgaaagatcaaggctggattcccactgtgccacacccctgccggttccttcgcttccatctgctcctgtggggatgatggcacccactcagctggatggccggtagagtgctagtgatgctgctgtcctcagctccccttactgtcgttatctaatgcaccagtgggtggtcaggtggcctcctgcatctccccgccagaactccttgctttccctatacctgcctcctctctagtagcaggggtgggtcccaggagtcgggtatcggtgggacaggaacgcgtgtctcctctccccagtccgtgggctccgtctacagtggcctgatgcagggagtgggggctgctgagaaggtgttcgagttcatcgaccggcagccgaccatggtgcacgatggcagcttggcccccgaccacctggagggccgggtggactttgagaatgtgaccttcacctaccgcactcggccccacacccaggtcctgcaggtgagggcgcggcttgaggcctgccagaatcagcctttccgtcaccccatttctggtgcacctcctatacaccaggctgtggcagggcagctgggaatatgtcaggcaagatcattgccctccaggagttttgggctccagttggggaagacagatacttaacagaatgattcccgataataagtgctagaaagaaaatagatcagggtgctgtggtagggatggtccatgggaatggtggtaacagtcaagaaggggttcttggaggaggtgacatttgaggtgagacctcaccaggggcctccctgcagagagaacattccagacagaggaaacagcaaatctcaaggtgcttccaagtcctagtgtcttagaaagaacgtttaggggccagcagtgcccaagcgagggagaggcacatggggtgggctgggaagggcacccacctgtgtccaaggtcagggcatccagtcctgggacctgagccgataaccccgcactgtgcctgtgtgttctttgcagaatgtctccttcagcctgtcccccggcaaggtgacggccctggtggggccctcgggcagtgggaagagctcctgtgtcaacatcctggagaacttctaccccctggaggggggccgggtgctgctggacggcaagcccatcagcgcctacgaccacaagtacttgcaccgtgtggtatgtgcacgggcctgggccacacttctccgccctttctgcatctaaccgtctttcttgtgagctgtaacaggtgcggaagagggcactagagataaatggacagttcaaagaattatcaccaattacaatgccctcctagagaaacagaacattcttgtccagacgtggtggctcacacctgtaatcccagcattttgggaagctgaggctggaggatcccttgaggccagcctggacaacatagtgagactccgtctctattaaaaaagaaaaaaagggcagatgtgatggcccacacctgtaatcccagcactttgggaggccaaggcaggtggactgcttgagctcaggagttcaagaccagcatggccaacatggcgaaaccccatctctactaaaaatacaaaaattagccgggtgtggtggcacatgcctgtaatctcagctcctcaggaggctgaggcacgagaatcacttgaacccgggaggtagaggttgcagtgagccgagactgggccactgcactgcagcctgggcaacagaataagactctgtctcatgaaaaaaaagaaatagaacattctggcactccagaagcctcctaccccccgccatgtgtcccttctctttccccaagaagtaatgtgttgacttttagagtcttcatgctcttgcttttcattggttctgccatctctgtgtgcacccctgagctctgtgctgcctgctcggaacttcatctgggtagaatcgtgattggtgtgtggattagtttgtgtcttgtgtctcccactcgacattgtgagtcatccaggttgaggctggggacagagttcattcattttcattgctgggtggtaacccactatacatatgtttatcacaattatttatgcattctgggtatttgggttgtttccctttatttttgttttttgagatgagtcttgctctgttgcccaagctggagtgcagtggtgagatctcagctcactgcagcctccgcctcccgggttcaagctattctcctatctcagcccccctagtagctgggattacaggagtgcgtcaccatgcctgactaatttttgtatttttagtacagacagggtttcaccgtgttgcccaggctggtctcgaacccttgacctcaggtgatcagcctgccttggcctcccaaagtgttgggtttataggcgtgagccaccgtgcctcgctgggttgtttccctttatattttattttatttatttgtttatttttatttttatttttttttggagacagagtctcgctctgtcgcccaggctggagtgcagtggcacgatctcggctcattgcaagctccacctcccgggttcacgccattctcctgcctcagtctcctgagtagctgggactacaggtgcacaccacaacgcctggctaattttttgtatttttagtagagacggcatttcaccatgttagccaggatggtctcgatctcctgacctcgtgatccacccgcctcggcctcccaaagtgctgggattacaggcatgagccactgcacctggcctatttttatttttttgagaaagggtctccctctgttgcccaggctggagtgcagtggcacagtcacaacttactgcagcctcagagtcctgtgctcaagtcatcctcccacctcagcctcccaagtagctgggactgcaggcacatgccattatgcccagctaattttatttttttgtagaaatgtggtctcaccatgttgcccaggctgatctcaaacacctggcctcaagtgatcctcctgcctcagcctcccaaagtgctgggatgacaggtgtgagcctctgcccccggcctgtttttcagttttgttttgttttgttttgttttaccattaccaaaaataccagtgtgggatgtggacaattttgtctatgttttctgttgtacatgagtacgttctcccaaggtataatcctaagagtagaaagcttggtgatagtggatgtacatccccaactgccgtagtttctgtcacaacagctatccccaggtggttataccaatttacattttacaatttacattctactagcagtgaaggagagtttcagctgttccacatttaggtcatctccagtactcaaaataggctattcatgactggacagtttttagtaatcctttcaggaaaggaaccataacacctgtccctgtgctggcctaagagcagggatgccctggatggttgctcaggttgtgcactgtccaagaaatataaactattaagggagcaccgtttacatcatcaacataaattatgtgaaagcctgagtgttggcacagagattccagaactcctagccaagttcgagatggtggtgagggccatgggttgtgaaatctgcccacaccatgtgcatgtaaccagaggtagattgttgtgaaatggtgccaagtgggaggccaccaggctgctgctcaccaaagttttagaagagccccctgggcagagccgttcacactttgcagtaggtaccacgcttcgattctcagacacctaacattgtcagtcctgaatttttgctaactggtgagaatgtagtggtagcttattgtggtcttttgtgttttcctgatgactgaagatattaaacaccttttcatatattggccatttggttttccttcatgaatagcctctcttaattatttatttatgtactttttcttttctttttttttttttaagatggagtctcgctctgtcgcacaggctagagtgctgtggcatgatctcggctcactgcaacttcttcctcctgggttcaagcgattctcctgcctcagcttcccaagtagctgggactacaggcacataccaccacacccggctaattttttgtagttttagtagagacaaggtttcaccatgttggccaggctggtctcgaactcctgacctcaagtgatccacccgccttggcctcccaaaatgctgggagtgagccatggcgcctggactatttatgtactttttgtttgagataggatctcactctgtcacccaggctggaatgtggtggtgtgatcatggttcactgcagccacgacctcctgggctcaagcaatcctcccacatcagcctcctgagggactataggtgcacaccaccacatctggtcaattttttttttttttttgagatggagttttgctcttgttgcccaggctggagtacaatggcacgatctcagctcaccacatcctccgcctcgaggggtcaagtgattctcctgcctcatcctcttgagtagctgggattacaggcatgcaccaccacacccagctaattttttatttttagtagagacagagtttctccatgttggtcaggctggtctcaaactcttgacctcaggtgatccgcccacctcggcctcccaaagtgctaggattacaggcatgagccaccgtgtacacctggccaatttttaattattttgtagagacgggttctcactgtgttgctcaggctgatctcaaactcctgggctcaagccatcctcccaccttagcctcccaaactgttggtgttacaggtgtgaaccaccatggctggcctctatttttaaatttaaaatgttaatttctataaacataaaacaataaaatgctacaagctaatcatattctcatagttgtaatgaatcttgtaactaagacatgaatgttcccctccaccttaccttttgaattccaccacatggaggtagccagtgttaacagtttagtaaatatccttttcaatgtgtttcctatctttatagaaatatatcaatatatgaaggtacacgtttataatttttttaaacaaaaatagaatcatgctgtgtatatgtatctattacaattcagttttaaggatgcactgtcactatttaaccaatccccatttatggacacctagattgtttccattttaatttaattaattaactaattaacttttgctacttatggtgttgcaatgatatcttccatactatatatttttttcattttgtagatatggggtctttctgtgttgcccaggctggtcttgaactcctagactaaagccattctcctgcctctgcctccctaagtgctgggattacaggcatgagccaccaggcctggccatactattatttttgtaggcccagattcctgaaactggaatctagagatgatagctcctttaaattgttctcttagaagggaggggaccaccgccagggcagtctgtgtgacctggagccctgctgtggcctcttgcttcctgagatgagcagactcattcacagcaacattctatattctatccctctttctttttttcaggacagggatggccagtgagctttctcttagaggtcagggaacttggcttatcccagagcagcaaatgtagcaggccccagtttgctgattaggggaggctgagggcttgtgggtacaggcgggagtcactgttggggaagaagagaggcagctcagtgcagtcactgggccctgatcaggtttcaggcctgagactgctggtgtctccaggccccaggcagcaaggctgctggggacagctggatgaacacattcctggcctctcatgctccatgctccctcctccccagatctccctggtgagccaggagcccgtgctgttcgcccgctccatcacggataacatctcctacggcctgcccactgtgcctttcgagatggtggtggaggccgcacagaaggccaatgcccacggcttcatcatggaactccaggacggctacagcacaggtgtggagctgggggtggcccctctcctgggcccacagggtcaccctcagggacataaccctctgagttaagcactgccccctgccacctgctcttttttttgtagagatggggtcccgctacgttaccctggccagactcgaacctcctgcgctcaagcaatcttcctgcaatccccaaagtgctgggattacaggcatgagccactgtgctgtgactcagcaaaatatttattaagtaaattattatagaagcccatacactggaatattatgctgctgggaaaaagaggaagtagaagaagggggaggaggtggaggcggaggaggaggtggaggcagaggaggaggcagctctccatatagcagtatggaaaggtcactgagataggatgctgagtgagaagagccaggtgcagagcataaggagctgggttttttttttcctattaaaggactggggagataaaaataacatgttcatatttgcataaagaaactagacaaggacatgtaagcaactaatgaaagacgttttggtgggagcaggagggaactgaagaaagaacttaaacttttcattatttagagttttatatatttttagtttttttagttttttttttttttttgaggcaggggcttgctctgtcacccaggtgggagtgcagtggcgtgatcacggctcactgcagcctcaacctcttgggctcaagccatccttccaccccactttttatttttgttgtagagacggggtcttgctatgtttcccaggctggtctcaaattcctgggctcatgcaatcctcctgcctcccaaagtgctgggattacaggcatgagccattgtatccagcctgtatttttagatttttgaaccacacgaatagccccttttcaataattaaatatatacaatgtataggggggttggggagatgttgatcaaaagataaaaattttcccttaggaataaggtcaagagacctgttgactatagttttttgtttgtttgtgttttaattgagacagtctcactctgtcgcccaggctggagtagagtggagtaatcttgcctcactgcaacctccgtctcccaggttcaagcgattctcctgcctcagcctcctgagtagctgggattacaagtgcccaccaccacaccttgctaatttttttttgtattgttagtagagacggggtttcactattttggccaggctggtcttgaactcctgacctcaggtgatctgcctgccttggcttcccaaagtggtgggatttcaggtgtgagccactgtgtctggccagctatatttagtaacagtgtactgtgtacttgaaaatagctaagagagtagattttaagtgttctctctttaaaaaagtgataaatatgtgagataatgtatatgttaactggcttgatttagctattccacagtgtatatgtatttcagagcatcacgttgtacaccattaaatacaaactatttttacttgtcaatttaaaagaatttttaaattaaaatatactaaatacactaatttttaaaaaaattacctcgatatgaacttaagtagttctagtaattaattgatataataaatatatattattttagaatagtgttttgaaattcagtagaggtggtggttgtgcaacattgtgaatgcactaaatgccactggattattcactttttttttttttcttgagatggagtctcgctctgtcgcccaggctggagtgcagtggcgcgatctcggctcacggcaacctcttcctcccgggttcaagtgattctcttgcctcggcctcccgagtagctgggattacaggcatgtgccaccatacccggctaattttgtgtatttttagtagagacagggtttcaccatattagccaggatggtctcaatctcctgaccttgtgacccgcccaccttggttggcctcccaaagtgctgggagccaccgtgctcagcccggattattcactttacaatggttatgtttatgttatgtcagtttcatctcaatgaaagaaaaatgaaataataaagaactggtggcgtggccaggtgcagtggctcacgtctgtaatcccagcactttggaggccaaggcaagaggatcgcttgaggccaggggtttgagaacagcttgggcaatgtagtgagaccccacctctacagaaaaatattttaagttagccaggtgtggtggcatgcacctgtagtctcagttactcagaaggctgaggctggaggattgcttgaacccagaagtttgaggctacagtaagcagtgattgtactactgcactctagcgtgggtgagagagtgagaccctgtctctaaaataataataattgattgactcaatttcctattgatggacatttgagtctatttgttttattttttgcaataacagcgctgtgggtcacaggtgacctgtgtctatattgttgtgcatgggaggaagtcggtccatggggaaaattggtccaggtgggcttgcggggccacaggccacacatctgtggtgaatacacacaacctttgcactgcacagactcatagacccagggttattgctgcagctcttcaagccatggggctcgctccaactccccttctccaggaggacgggtgagggcctgtctccctgcagcctcacctgcactgtgtgctatcagatgtttgggtttctgccaaatgaatgagtgaaaattggtaacttgctatcaatttgcatgtaggcttaatctgcatgccccttatgagttgggtggggggaacatcatttcatgagctttcaagttgtgggttccagcccgccctttccacagctgcagggcagggcctctcactcttccccggtgctgcccggcctcacccattgctaaattgtctctgtgcctccaccatacagagacaggggagaagggcgcccagctgtcaggtggccagaagcagcgggtggccatggcccgggctctggtgcggaaccccccagtcctcatcctggatgaagccaccagcgctttggatgccgagagcgagtatctggtgagtcacagggtggtgggcaatgcgggggcaggagcggctccaggtggccagagcccccatcgcccagcagatggatgctgagaagagacgggccccaggagctctcccagactatcagcctcctgggctggtgaattcctggtgttgagagtggggagccaggagccactctggacccagcctccaggctccaggcagagctgtatggtgtggggcaagagaaggcatcagaatggggagacctgggtcatgagtggtggcttacacctgtaatcccagcactttgggaggccgaagcaggtggatcacctgaggtcaggagttgcagaccagcctggccaacatggtgaaaccccatctctactagaaatacaaaaactagccaggtgtggtagcacatgcctataatcccagctacttgggaggctgaggcaggagaattgcttgaacctgggaagtggaggttgcagtcagccgagattgtgccactgcactccagcctgggcgacagagccagactccatctggctcaaacaaacagacaaaacaaaacaaaataaaataggcccagtatgatggctcatgcctataatcccagcactttgggaggccaaggcaggtggatcacttgaggtccggagttcgagacaagcctggtcaatacagtgaaaccctgtctctactaaaaatacaaaaattagctgggcatggtggtgcatgcctgtaaccccagctactcgggaggctgaggcaggagactcacttgaacccgggagatggaggttgcagtgagctgagattgtgccactgcactctagcctgggcgacagagtgagactccatctacaaaaaaaaaaaaaaaaaggctgggcgcagtggtttatgcctataatcccagcactttgggaggccgaggcgggtggatcacctgaggtcaggagttcaagaccagccgggccaacatggtgaaattccatctctactaaaaatacaaaagtccgccaggtatggtggcaggtgcctgtaatcctagctacttgggaggctgaggcaggagaatagcatgaacctgggaagcagaggttgcaatgagccgagattgcaccactgcactccagccttggcaacagagtgagactccatctgaaaaaacaaacaaacaaacaaaaacaaaaaacagaatggggatacctggattagcagctccgtcctacagtttataactgtgtgacctcaagctagtgcttcccctctgagtcgcattctcactggtcaggtgggcccagtcatgtatttgcagatggctagcaacctcagtctatgcgcggattgattcatttgttacacagagagttactgagctcttctcaggcaccaggcaccaggcaccattctggggttatcgtgggctaactagacaaagacccttgtccccatggtgtttccattccagtggggaaggcagataagaaacaaggaaggccaggcgcggtggctcacacctgtaatcccagcactttgggaggccgaggccaggcggatcacaaagtcaggtgttcgagaccagtctggccaacatggtgaaaccctgtctctactaaaaatacaaaaattagctgggtatggtggcgggcacctgtaatcccctagctacttgggaagctgaggcgtgagactcgattgaacccacgaggcagaggttgcagtgagctgagatcgcaccaccgcactccagcctgggtgacagcaagacttaaaaaaaaaaaaaaaaaaaaaggagggggaagggaaggaccagaagactggagggccagggtagagctgatcccccattcaccaggtgcctcattgtgtctggccctgagctgtctccctttaagaaaaacccaggaagctggccatcgtttgtgaactgagcctcagagaggttaagcatcagcccataggccgtggcatgaagcacggttgcgggtggggcgtccgtgccatgcaagccaggcccccactgtccccgcagatccagcaggccatccatggcaacctgcagaagcacacggtactcatcatcgcgcaccggctgagcaccgtggagcacgcgcacctcattgtggtgctggacaagggccgcgtagtgcagcagggcacccaccagcagctgctggcccagggcggcctctacgccaagctggtgcagcggcagatgctggggcttcagcccgccgcagacttcacagctggccacaacgagcctgtagccaacggcagtcacaaggcctgatggggggcccctgcttctcccggtggggcagaggacccggtgcctgcctggcagatgtgcccacggaggcccccagctgccctccgagcccaggcctgcagcactgaaagacgacctgccatgtcccatggatcaccgcttcctgcatcttgcccctggtccctgccccattcccagggcactccttacccctgctgccctgagccaacgccttcacggacctccctagcctcctaagcaaaggtagagctgcctttttaaacctaggtcttaccagggtttttactgtttggtttgaggcaccccagtcaactcctagatttcaaaaacctttttctaattgggagtaatggcgggcactttcaccaagatgttctagaaacttctgagccaggagtgaatggcccttccttagtagcctgggggatgtccagagactaggcctctcccctttacccctccagagaaggggcttccctgtcccggagggagacacggggaacgggattttccgtctctccctcttgccagctctgtgagtctggccagggcgggtagggagcgtggagggcatctgtctgccatcgcccgctgccaatctaagccagtctcactgtgaaccacacgaaacctcaactgggggagtgaggggctggccaggtctggaggggcctcaggggtgcccccagcccggcacccagcgctttcgcccctcgtccacccacccctggctggcagcctccctccccacacccgcccctgtgctctgctgtctggaggccacgtggatgttcatgagatgcattctcttctgtctttggtggatgggatggtggcaaagcccaggatctggctttgccagaggttgcaacatgttgagagaacccggtcaataaagtgtactacctcttacccctaacctctgacttctacttgggccaactgcctcatcgcccagttaggtttttccaccagaccacggctctcctctcagccctctctggtggagttgcagagagactttgggtggtccagggcctccccctgtgtctgggagccccatctgcactcctcccatcccagggtctctggtgtagacattcctgtctgcctgtctccacggggattgcgcagggggatagagacgttgccttgaaatcccaggggcctctgtgcttcccgggacagctgaactgaggcccaacaaatgccacctgttcttttccatcggggcccaggcacccgacacccaccccaatccatgcagtaaagaaatattacccaggaggacagctcaatcagcagggaggtttgggcccggacacaggaagacccctgcggtggttattcttacttgctgaattgtgaagaactctggggtcccaggaggagggctctgtgccaactggtagagtagtatttcaatttttttttttttttttgagacagagccttgctctgtcacccagattggagtgcagtggcacaatcttggcttactacaacctccacctcccgagttcaagcgattctcctgcctcagcctcctgagtaactgggactacaggcacccaccaccacacccggctcatttttgtatttttagtaaagatgggtttcactgtgttggccaggctggtctcaaactcctaacctcagatggcctgcccaccttggcctccctaagtgctgggattataggcgtgagccaccgcgcctggccagccttgtctttctcttataaaagcacttgtcattggatttagaggccacctagataatccgggctgatctcatctagcggtcctttgcatctgcaaagacccttttttccaaatacggtcacttcacaggttcaggggtttgacaagggaagcttttgggggccaccactcagcctgctacagaggggaacttgcaaccttggttgaagttaacctcaggacttcctttttgattttaggaagcagagggggttaagttttcagagacttagcatatcttcagatgtttccagagaagttggaaattccaattttcatgtgagatcagctgttttttatgtattggctcaaattattttgacaaaaccgaggaccaacaagcacatgtgtagaggtggtctccagcctgtgcatctctagtttgtagcgtcagtgttggacattcctgttctgcaaagtccctcgcaaggggcttcctggccccagcccagccccgttccagtctaagctcctctcccatctgcctgtctcttctcatccctgcactttcaggctgagaattccagattcttctccctctcctatggagttagctccagtgccttgatttgtaaacccacacccaaaagtgcgccataggcagacaaaagaaccttccagagaccgaattaccttctttttaggaggtacataggagttttaaaaaagtaatgtttaggccagatgcagtggctcatgcctgtaatcccagcactttgggaggccaaggtgggtggatcacgaggtcaggagttcaagaccagcctggccaacatggtaaaaccctgtctctactaaaaatacaaaaattagccgggcgtgttggcacacgcctgtagtcccagctactcgggaggctgaggcaggagaattgcttgaatccgggaggcagaggtttcagtgagccgagatcacgtcactgcactccagcctgggtgacagagcgagactgtctcaaaaaaaaaaaaagtttaattttgaaataattttagatttacagaaaagtcacaaaacaatacagaaagttcccttatgccccacccctcacagtttctcttctcttaaaatcccacagtactggggtacatttgtcacaattaggaaaccaacatagcatgtcactatcagtgaaactgcaagctgtatttgtgtgtcactagttttcttactaatgtcctctttctgttccagtgtcccacattacatttaagataggagtgtttttgtttgtttgtttgtttgtttttagagacaggttcttgctctattgcccagactggagtgcagaggtgctatcacagctcactgtagcctcaaccttctgggctcaagtgatcctcccacctcagccttcagagtagctggggctacaggtgcacatcgccatgcccagctaattttttcttttgctttttttttttttgtagagacaggccttgctttgttgaacaggctggtctcaaacccctggcctcaatcaatcctcccaccttggcctcccaaagtgttgagcttataggcatgagccaccacgcccagctagagatataatgttttcttttgtttgttttattttggcagggttttttgttttagtttttgagacaggatctctctctgtcatccaggctggagtgcagtggcacaatcttagctcgctgcaacctctgcctccctggttcaagcgattctcctgcctcagtcttttgagtagctgggactacaggcgcctgcaccacacccagctaatttttttgtgtttttagtagagacagtgtttcaccatgttggccaggctggtcttgaactcctggcttcaagtaatccacctgcctcggcctcccaaagtgctgagattagaggtgtgagccactgcgcccagcctaatgtttttaaaattgtttttattgcagcaacatgcagacaatataaaacttatcattagtgacatctagtacacttatgatgttgtgtaaccatcatcattatctaattccaggacattttcatcaccctaacagaaaaccctatacccattaacagtcactccccaattcttcctccacacagcccctggccgccagcattctaaaatctggctctgcagattggcccctctggccttttcatgtacatggaaccctatactacgtggcctttcgtgtctggcttctctcatcatgtgtacaaggtccaaccatgttgtggcatgaatcagcactttattccttttcatggctgaatgatatcctattgtatggctatgccacattttgtttatccattcatctgttgatagatatttgggctgtttccacctttgggctattgtgaatagtactgctattagtgctgctaatagtgggaacattcatgttttgttgttgttgttgttgtttgagacggagtctcgctctgtcgcccaggttggagtgcggtgatgcaatctcggctcactgcaagctccgcctcccgggttcatgccattctcctgcctcagccgcccgagtagctgcgactagaggcgcccaccgccacacccaggtaattttttgcgtttttagtagagacggggtttcaccgcgttagccagaatggtctcaatctcttgacctcgtgatccacccatctcggcctcccaaagtgctaggattacaggcatgagccaccgcgcccggcccaacattcatgttttttttgtgggagtttgctttcgcctctcttgggtagatgcctgggagtggaattgctgggtcccatgagaactctgtgctcaacgttttgaggaactgccagactgtcttccacagcggctgcaccattttgcattcccaccagcaatccatgagggttgcaatttccccacatcctcaccaacacttgttattttctggttttgtttttgtttttaattatcaccatccagggccgggaacagtggctcacatctgtaatcccagcactttgggaggctgaggcaggcagatcgcttgagcccacgagttcaagaccagcctgggcaacgtggtgaaacctcatctctactaaaaaatccaaaaactgctagccgggcatggtggcacacacctgtggtctcagctgttcatgaggctgaagtgggaggattgcttgaactcggaaggtggaggttgtggtgagctggtatcatgccactgcactccagcctgggtgacagagtgagactctgtctcaaaaacaaacaatataaaattgtcaccatcctggtgggtgtggagagttatgacttttaaagctgacttttttctgttacaattaatttagcaaatgtcactgtcctccttctgtcccacacagtgtgctgggtaaaccaggagaaagtaattgcagtcgagggctttgggaacagcacagttggccagagagacagatgaggaaaacaagcagggatgagagagaatgaagaggagcacggcaccccagggctggcttagtcctggcgccaggacttagtttactctgtcattgtttctttcccacattagagtttgtcttcatcactgctgtattccccagtgcctagaacagtggctgacacatagtatgtgctcagtaaacagccattaaagaaatgtttgagctgagcatagaggcccatgtctgtaattccagctactcgggaggcttaggtgggaggatcacttgagtccacgagtttgaggctgccatgggctatgatcgtgccactgcactgcagcctgggcaacagagcatgaccctgtctctacaaaatttgaaaaagaaaggaatgattgaactcttcgatatgccgtaacatagtgtgaaaacaatgaacacagtccaatcacctcatttaacagacagggaaactgaggcccagagaaaagaaatgactgcagggttataaatgtatttagcagaatggccaaggctggaacccaggtccccacactccctgctgctgccttcgtctggagagtgtatttcagtttccaacttgccagggctaaagacgaccccaatcccaggaagatggcagactcagcccaagtcaatgcctgaggcagctgctgagccatgagaggtctctgaagtgacttggggtcctaggagcccacagggaccctggtgatgacttcagggtgaagatgtgcacaaagcaccttgcgaggcagagccccttccccatgccccctgctatctgctgcagctcccctgtcgactggactggtctgtgtcaacctcactctgtgtcggcaggttcaaaagccacacctgagaaaacggaaacagcacagaggagggttaagcccgatggccctggctcttcagggttttgttccagaacttttggggtcataaatttcttgggaaatttgatgaaaattctaggaactctcctcagaaaaatacccatgcacataaagcattgtatgcaacttgtgggaaacgtgtggtattttacaattcctctgtcagggggccctgagttaaggaccgttgctccactgggattaacaattaagaattaaaaattagccaatgtaagtatcagtgtggctgggcgccctggctcatgtctgtaatcccagcactttgggaggccaaggcgggcggatcacgaggtcaggagatggagaccatcctggctaacacagtgaaaccccgtctctactaaaaatacaaaaaaaaattagccgggcgtggtggcgggtgcctgtagtcccagctactcgggaggctgagcaggagaatggcgtgaacccgggaggcggagcttgcagtgcgtggaggtcgcgccactgcactccagcctgggcgacagagcgagactccgtctcaaaaaaaataaataaataaataagaagtactggtgtaaggcaggacacagtggtgcacgcctgtagtttcagctcctcaggagcctgaaacgggaggattgcttgagcctgggaggttgaggcagcagtgagccatgatggcgccactgcactccagcctgggcgacagagtgagaccctgtcttaagaaaaaaaatgccgagcactgtggctcacaactgtagtcccagtactttgggaggctgaggcaggtggatcacttgagtctaggagttcaagaccagcctgggcaacatagtgagaccccatctctactaaaaactttaaaaaaaagaagaagaaaaattagccaggtgtagtggcgtgtgcctatagtctcagctactccgaaggctgggatgggaaaatcgcttaagcccaggaattcaaggctgcagtgagcccataattgtgccactgcactccagcccgggtgatagagcgagaccttctctctaaacaataaaataataataataatagattggaaggctacacaaccaattcatgttggagtttgtctgggtattgaagacaaaagcatgaagatatgcaataccttacttctttaagaataaaaatagacttggctgggtgcagtggctcacacctgtaatcccagcactttgggaggccaaggtgagcggaacacttgaggccaggagttcgagaccatcttggccagcatggcaaaacccatctctactaaaaatacaaaaattagccgggcgtggtggcacatgcctgtagtcccagctactcgggaagctgaggcaggagaatcacttgaacccgggaggcggaggttgcaatgagctaagatcgtgccactgcactccagcctgggcaacagagtgagactccatctcaaaacaatgaagtccatatttctaaaaaataaaaataaaaaaattaaaaagactcaaagcaaagagaggaaatcgttagcaatggctagtcctgagcggtgggtaccatgtgtttgttatattgttctatgtacatttctgaatactagaattttcttcaggggtaggagagggaacactgtaaacaaactaaacaaaccctggcatgataagtgctgctgtggcccaggaagacttcctgggagaaatggaaagcagctgttctgacttctgttgactgaaaatagcagtcgttaagccacccaacagcaagccagtgcatccggctgagaacctggcccagacctgagcggccggccgggcgtctccacctcctccctccctagccgcctctattcaatgagcccagcctgaaacaggggcctggcattctagacagttccacagagaagaaactctggaacccagcactgacacagccattgctgctgaccatttgtttctggccccaggtaaggaagctgttatttcaaataataatacggacaattttttaaattttttttttggcagagggagctcagaaggaggttaattctttaatgtttgctttttgttttgttttgagacagagtctctgtctcccagggtagagtgcagtggcgcgatctccgctcactgcaaaccccgcctcccatattcaagcgattctcctgcctcagcctcccgagtagctgggattacaggcatgtgccaccacacccagctgatttttgtatttttaatagagatggagtttcatcatgttggccaggctggtctcgaactcctgacatcaggtgatccacctgcctcgctctcccaaagtgctgggattacagacgtgagccactgtcctcggccaatgtttgctttttaaattgtggtaaaatacacataacataacattaaccattgcatttatttattattgttattttttagagacagggtcttgctctgttgcctagcctggagtgcagtggtgccatcatagctcacttcagccttgaacttctgggctcaactgatccttctgcctcaggctcctaaatagctgggactacagcctgtgccaccatgcctggctaatttttagattttctgtagagacagagttgtggttatgttgcctaggctggtcttacattcctagtttcaagcgatccttctgcctcggcctcccaaagtgctgggattacaggtgtgccccatcacgcccagccaaccattttaaattgcatgatccagaggcattaagcagactcccaatgtttcctttgacatttagcaagcatatttattatcttcttagatctgaatgaccagcctgcagatatcagaaccgagatggattgatgatgatgacaatgataaccattcaggtataaaacattttcagtgcagcaaacacgagtctatgcgctttatgtgattttttttttaagacaggggtctcactctgttgcccaggctggagtgcagtggtacgatctcacctcactgcaacatctgcctcccagactccagtgagcctcccacctcaccctcccaagtagctgggactacaggcatgtgccaccatgcctggcaaaattttttttttttgtattttttgtagaaacggggtttcaccatgtcacccaggctggtctcaaagtcctgacctcaagtgatcctcccaccttggcctcccaaagtactgggattacaggtgtgagccactatgcctggcccactttatgtgactttaacgcttttaatcctcacaacaagtctatgaagcagctactacggttaatgcagttttttcaaaaaagaaaaatgaggttaagtaacctgcaaaaattaagtggcacagcactgggaactgaacacaggcagcccgaaccctgaccagagccctgaaccttttccctagactggggacaggtttataggcttatctaatctccacccaaattattttccacctttgccttttttttttttttttcctttgcagttgtcactaagggctgcttgttgcacctcaggagctggggatagtgaaggagatacctgtgctgagtcactaacaggaaagggctgagaaagaagcatcgccaatggtttctctttcctggtttttattctttcctcagagaggaggaagttgaccatttaaacaggtgagttggctgggcgtggtggctcatgcctgtaatcccagcactttgggaggccgaggcaggcggaccacttgaggtcaggagttggagaccagcctggccaacatggtgaaaactcatctctactaaaaacacaaaaattagccaggtgtggtggggaggctgaggcaggagaatcacttgaacccgggaggcagaggtggcagtgagccgagattgtgcctctgaactccagcctggacgacagagtgagactccatctaaaataaataaataaataaataaataaataaataaataaataaacaaacaaacagatgagtcacccagggggaggtcctaacagcgacctaaggtgacagtgacagtgcctcacattattacagctctttacctttgactacctgagatcagtcattcagtaagcatttattgagaacctccgtctaccagaaactgtgctaggttgtgggtcacagtggagactaagaggtccgagatcacctacatcctactgggtaataaactccagatggtgaaaagatggcagcagacaagagagtgacttgggagaggagcactgtttgagctggggtggtctggggaggtgatatgggagctgagccctgaatgacaaggaggtaccagctttgggtatctagaggaaagaatgatcccaaccacagtctggcacttcctcaaaaagctcaacatggacctgggcacagtggctcacagttgtaatcccagcactttgggaggctgaggcgggaggattgcttgaagccaggagtttgagaacagcctgggcaacatagtgggaccccatccctacaaaaatttaaaaatcagccaggcgtggtagtgcataccggtcgtcccagctacttgtgtggctgaggcaggaggatcctttgagctcaaggaggttgaggctgcaacgaaccatggtggtgccactgcactccagcctggatgacagagtgagacctcgtctctaaaaataataaaataaagccaaaaagtgcaaacaatccaatgtatgaatggataaacaaactgcaaaccgtggtatgcacatactgtgggatatgattcagctgtagaaaggaatgaagtgctggtacatgctataacatagatggtccttagaagcattatgcaaatgaaagatgccaggcagggaaggtcacctat

SEQ ID NO: 112 - DNA, 3505 bp, Homo sapiens
cccgtccatcagcctgtctcaacgcacgccagtctcagctccgaccttgcagcggcgcagcgcgggtgggaggcggggaggagcagcgggaagagcggagcgaggaccgcgtccggcgcagtcttcaatgagcagcgcggaaactgcaccccagacccgagcctgctgcgcgccccctcccagagctcacctggtgccaggtaacaggcccacgggaggaaggactggagctgagacaggagctacaacctggccttcagcacccgcccacctccaaccagcaggatgcggctgtggaaggcggtggtggtgactttggccttcatgagtgtggacatctgcgtgaccacggccatctatgtcttcagccacctggaccgcagcctcctggaggacatccgccacttcaacatctttgactcggtgctggatctctgggcagcctgcctgtaccgcagctgcctgctgctgggagccaccattggtgtggccaagaacagtgcgctggggccccggcggctgcgggcctcgtggctggtcatcaccctcgtgtgcctcttcgtgggcatctatgccatggtgaagctgctgctcttctcagaggtgcgcaggcccatccgggacccctggttttgggccctgttcgtgtggacgtacatttcactcggcgcatccttcctgctctggtggctgctgtccaccgtgcggccaggcacccaggccctggagccaggggcggccaccgaggctgagggcttccctgggagcggccggccaccgcccgagcaggcgtctggggccacgctgcagaagctgctctcctacaccaagcccgacgtggccttcctcgtggccgcctccttcttcctcatcgtggcagctctgggagagaccttcctgccctactacacgggccgcgccattgatggcatcgtcatccagaaaagcatggatcagttcagcacggctgtcgtcatcgtgtgcctgctggccattggcagctcatttgccgcaggtattcggggcggcatttttaccctcatatttgccagactgaacattcgccttcgaaactgtctcttccgctcactggtgtcccaggagacaagcttctttgatgagaaccgcacaggggacctcatctcccgcctgacctcggacaccaccatggtcagcgacctggtctcccagaacatcaatgtcttcctgcggaacacagtcaaggtcacgggcgtggtggtcttcatgttcagcctctcatggcagctctccttggtcaccttcatgggcttccccatcatcatgatggtgtccaacatctacggcaagtactacaagaggctctccaaagaggtccagaatgccctggccagagcgagcaacacggcggaggagaccatcagtgccatgaagactgtccggagcttcgccaatgaggaggaggaggcagaggtgtacctgcggaagctgcagcaggtgtacaagctgaacaggaaggaggcagctgcctacatgtactacgtctggggcagcgggctcacactgctggtggtccaggtcagcatcctctactacgggggccaccttgtcatctcaggccagatgaccagcggcaacctcatcgccttcatcatctacgagtttgtcctgggagattgtatggagtccgtgggctccgtctacagtggcctgatgcagggagtgggggctgctgagaaggtgttcgagttcatcgaccggcagccgaccatggtgcacgatggcagcttggcccccgaccacctggagggccgggtggactttgagaatgtgaccttcacctaccgcactcggccccacacccaggtcctgcagaatgtctccttcagcctgtcccccggcaaggtgacggccctggtggggccctcgggcagtgggaagagctcctgtgtcaacatcctggagaacttctaccccctggaggggggccgggtgctgctggacggcaagcccatcagcgcctacgaccacaagtacttgcaccgtgtgatctccctggtgagccaggagcccgtgctgttcgcccgctccatcacggataacatctcctacggcctgcccactgtgcctttcgagatggtggtggaggccgcacagaaggccaatgcccacggcttcatcatggaactccaggacggctacagcacagagacaggggagaagggcgcccagctgtcaggtggccagaagcagcgggtggccatggcccgggctctggtgcggaaccccccagtcctcatcctggatgaagccaccagcgctttggatgccgagagcgagtatctgatccagcaggccatccatggcaacctgcagaagcacacggtactcatcatcgcgcaccggctgagcaccgtggagcacgcgcacctcattgtggtgctggacaagggccgcgtagtgcagcagggcacccaccagcagctgctggcccagggcggcctctacgccaagctggtgcagcggcagatgctggggcttcagcccgccgcagacttcacagctggccacaacgagcctgtagccaacggcagtcacaaggcctgatggggggcccctgcttctcccggtggggcagaggacccggtgcctgcctggcagatgtgcccacggaggcccccagctgccctccgagcccaggcctgcagcactgaaagacgacctgccatgtcccatggatcaccgcttcctgcatcttgcccctggtccctgccccattcccagggcactccttacccctgctgccctgagccaacgccttcacggacctccctagcctcctaagcaaaggtagagctgcctttttaaacctaggtcttaccagggtttttactgtttggtttgaggcaccccagtcaactcctagatttcaaaaacctttttctaattgggagtaatggcgggcactttcaccaagatgttctagaaacttctgagccaggagtgaatggcccttccttagtagcctgggggatgtccagagactaggcctctcccctttacccctccagagaaggggcttccctgtcccggagggagacacggggaacgggattttccgtctctccctcttgccagctctgtgagtctggccagggcgggtagggagcgtggagggcatctgtctgccatcgcccgctgccaatctaagccagtctcactgtgaaccacacgaaacctcaactgggggagtgaggggctggccaggtctggaggggcctcaggggtgcccccagcccggcacccagcgctttcgcccctcgtccacccacccctggctggcagcctccctccccacacccgcccctgtgctctgctgtctggaggccacgtggatgttcatgagatgcattctcttctgtctttggtggatgggatggtggcaaagcccaggatctggctttgccagaggttgcaacatgttgagagaacccggtcaataaagtgtactacctcttacccctaa

SEQ ID NO: 113 - protein, 754 aa, Homo sapiens
MRLWKAVVVTLAFMSVDICVTTAIYVFSHLDRSLLEDIRHFNIFDSVLDLWAACLYRSCLLLGATIGVAKNSALGPRRLRASWLVITLVCLFVGIYAMVKLLLFSEVRRPIRDPWFWALFVWTYISLGASFLLWWLLSTVRPGTQALEPGAATEAEGFPGSGRPPPEQASGATLQKLLSYTKPDVAFLVAASFFLIVAALGETFLPYYTGRAIDGIVIQKSMDQFSTAVVIVCLLAIGSSFAAGIRGGIFTLIFARLNIRLRNCLFRSLVSQETSFFDENRTGDLISRLTSDTTMVSDLVSQNINVFLRNTVKVTGVVVFMFSLSWQLSLVTFMGFPIIMMVSNIYGKYYKRLSKEVQNARNTAEETISAMKTVRSFANEEEEAEVYLRKLQQVYKLNRKEAAAYMYYVWGSGLTLLVVQVSILYYGGHLVISGQMTSGNLIAFIIYEFVLGDCMESVGSVYSGLMQGVGAAEKVFEFIDRQPTMVHDGSLAPDHLEGRVDFENVTFYWHTQVLQNVSFSLSPGKVTALVGPSGSGKSSCVNINFYPLEGGRVLLDGKPISAYDHKYLHRVISLVSQEPVLFARSITDNISYGLPTVPFEMVVEAAQKANAHGFIMELQDGYSTETGEKGAQLSGGQKQRVAMARALVRNPPVLILDEATSALDAESEYLIQQAIHGNLQKHTVLIIAHRLSTVEHAHLIVVLDKGRVVQQGTHQQLLAQGGAKLVQRQMLGLQPAADFTAGHNEPVANGSHKA

SEQ ID NO: 114 - DNA, 3334 bp, Homo sapiens
cccgtccatcagcctgtctcaacgcacgccagtctcagctccgaccttgcagcggcgcagcgcgggtgggaggcggggaggagcagcgggaagagcggagcgaggaccgcgtccggcgcagtcttcaatgagcagcgcggaaactgcaccccagacccgagcctgctgcgcgccccctcccagagctcacctggtgccaggtaacaggcccacgggaggaaggactggagctgagacaggaggatgcggctgtggaaggcggtggtggtgactttggccttcatgagtgtggacatctgcgtgaccacggccatctatgtcttcagccacctggaccgcagcctcctggaggacatccgccacttcaacatctttgactcggtgctggatctctgggcagcctgcctgtaccgcagctgcctgctgctgggagccaccattggtgtggccaagaacagtgcgctggggccccggcggctgcgggcctcgtggctggtcatcaccctcgtgtgcctcttcgtgggcatctatgccatggtgaagctgctgctcttctcagaggtgcgcaggcccatccgggacccctggttttgggccctgttcgtgtggacgtacatttcactcggcgcatccttcctgctctggtggctgctgtccaccgtgcggccaggcacccaggccctggagccaggggcggccaccgaggctgagggcttccctgggagcggccggccaccgcccgagcaggcgtctggggccacgctgcagaagctgctctcctacaccaagcccgacgtggccttcctcgtggccgcctccttcttcctcatcgtggcagctctgggagagaccttcctgccctactacacgggccgcgccattgatggcatcgtcatccagaaaagcatggatcagttcagcacggctgtcgtcatcgtgtgcctgctggccattggcagctcatttgccgcaggtattcggggcggcatttttaccctcatatttgccagactgaacattcgccttcgaaactgtctcttccgctcactggtgtcccaggagacaagcttctttgatgagaaccgcacaggggacctcatctcccgcctgacctcggacaccaccatggtcagcgacctggtctcccagaacatcaatgtcttcctgcggaacacagtcaaggtcacgggcgtggtggtcttcatgttcagcctctcatggcagctctccttggtcaccttcatgggcttccccatcatcatgatggtgtccaacatctacggcaagtactacaagaggctctccaaagaggtccagaatgccctggccagagcgagcaacacggcggaggagaccatcagtgccatgaagactgtccggagcttcgccaatgaggaggaggaggcagaggtgtacctgcggaagctgcagcaggtgtacaagctgaacaggaaggaggcagctgcctacatgtactacgtctggggcagcgggtccgtgggctccgtctacagtggcctgatgcagggagtgggggctgctgagaaggtgttcgagttcatcgaccggcagccgaccatggtgcacgatggcagcttggcccccgaccacctggagggccgggtggactttgagaatgtgaccttcacctaccgcactcggccccacacccaggtcctgcagaatgtctccttcagcctgtcccccggcaaggtgacggccctggtggggccctcgggcagtgggaagagctcctgtgtcaacatcctggagaacttctaccccctggaggggggccgggtgctgctggacggcaagcccatcagcgcctacgaccacaagtacttgcaccgtgtgatctccctggtgagccaggagcccgtgctgttcgcccgctccatcacggataacatctcctacggcctgcccactgtgcctttcgagatggtggtggaggccgcacagaaggccaatgcccacggcttcatcatggaactccaggacggctacagcacagagacaggggagaagggcgcccagctgtcaggtggccagaagcagcgggtggccatggcccgggctctggtgcggaaccccccagtcctcatcctggatgaagccaccagcgctttggatgccgagagcgagtatctgatccagcaggccatccatggcaacctgcagaagcacacggtactcatcatcgcgcaccggctgagcaccgtggagcacgcgcacctcattgtggtgctggacaagggccgcgtagtgcagcagggcacccaccagcagctgctggcccagggcggcctctacgccaagctggtgcagcggcagatgctggggcttcagcccgccgcagacttcacagctggccacaacgagcctgtagccaacggcagtcacaaggcctgatggggggcccctgcttctcccggtggggcagaggacccggtgcctgcctggcagatgtgcccacggaggcccccagctgccctccgagcccaggcctgcagcactgaaagacgacctgccatgtcccatggatcaccgcttcctgcatcttgcccctggtccctgccccattcccagggcactccttacccctgctgccctgagccaacgccttcacggacctccctagcctcctaagcaaaggtagagctgcctttttaaacctaggtcttaccagggtttttactgtttggtttgaggcaccccagtcaactcctagatttcaaaaacctttttctaattgggagtaatggcgggcactttcaccaagatgttctagaaacttctgagccaggagtgaatggcccttccttagtagcctgggggatgtccagagactaggcctctcccctttacccctccagagaaggggcttccctgtcccggagggagacacggggaacgggattttccgtctctccctcttgccagctctgtgagtctggccagggcgggtagggagcgtggagggcatctgtctgccatcgcccgctgccaatctaagccagtctcactgtgaaccacacgaaacctcaactgggggagtgaggggctggccaggtctggaggggcctcaggggtgcccccagcccggcacccagcgctttcgcccctcgtccacccacccctggctggcagcctccctccccacacccgcccctgtgctctgctgtctggaggccacgtggatgttcatgagatgcattctcttctgtctttggtggatgggatggtggcaaagcccaggatctggctttgccagaggttgcaacatgttgagagaacccggtcaataaagtgtactacctcttacccctaa

SEQ ID NO: 115 - protein, 711 aa, Homo sapiens
MRLWKAVVVTLAFMSVDICVTTAIYVFSHLDRSLLEDIRHFNIFDSVLDLWAACLYRSCLLLGATIGVAKNSALGPRRLRASWLVITLVCLFVGIYAMVKLLLFSEVRRPIRDPWFWALFVWTYISLGASFLLWWLLSTVRPGTQALEPGAATEAEGFPGSGRPPPEQASGATLQKLLSYTKPDVAFLVAASFFLIVAALGETFLPYYTGRAIDGIVIQKSMDQFSTAVVIVCLLAIGSSFAAGIRGGIFTLIFARLNIRLRNCLFRSLVSQETSFFDENRTGDLISRLTSDTTMVSDLVSQNINVFLRNTVKVTGVVVFMFSLSWQLSLVTFMGFPIIMMVSNIYGKYYKRLSKEVQNARNTAEETISAMKTVRSFANEEEEAEVYLRKLQQVYKLNRKEAAAYMYYVWGSGSVGSVYSGLMQGVGAAEKVFEFIDRQPTMVHDGSLAPDHLEGRVDFENVTFYWHTQVLQNVSFSLSPGKVTALVGPSGSGKSSCVNINFYPLEGGRVLLDGKPISAYDHKYLHRVISLVSQEPVLFARSITDNISYGLPTVPFEMVVEAAQKANAHGFIMELQDGYSTETGEKGAQLSGGQKQRVAMARALVRNPPVLILDEATSALDAESEYLIQQAIHGNLQKHTVLIIAHRLSTVEHAHLIVVLDKGRVVQQGTHQQLLAQGGAKLVQRQMLGLQPAADFTAGHNEPVANGSHKA

SEQ ID NO: 116 - DNA, 3480 bp, Homo sapiens
ggaaacggtctgcggagaaagatgctcctgggccgggttgggaccggcggcctcctcgttccgcctcccagttttcccactacgaggcagggactaatggctccactttacagacagctgaactgggtcgtgccttcacaggacggggagaggaagggactcggagccccaaggcctttgacttaaacgccgacccaccccccgccgtctgcccggagctcgtggagaaccagccgagctgaggacagtttaaagagctcggaggtccgactagttcccgctggtgcttcaatcatccagccctgtacgtttcagtttggatttagcatctaccccgggtccctgcctggcgcttccggtccctccgccacagtctgttggattacctcagattgccccagcctggcctcgccctgtggatgatgatggccttgcccccgtgagctacaacctggccttcagcacccgcccacctccaaccagcaggatgcggctgtggaaggcggtggtggtgactttggccttcatgagtgtggacatctgcgtgaccacggccatctatgtcttcagccacctggaccgcagcctcctggaggacatccgccacttcaacatctttgactcggtgctggatctctgggcagcctgcctgtaccgcagctgcctgctgctgggagccaccattggtgtggccaagaacagtgcgctggggccccggcggctgcgggcctcgtggctggtcatcaccctcgtgtgcctcttcgtgggcatctatgccatggtgaagctgctgctcttctcagaggtgcgcaggcccatccgggacccctggttttgggccctgttcgtgtggacgtacatttcactcggcgcatccttcctgctctggtggctgctgtccaccgtgcggccaggcacccaggccctggagccaggggcggccaccgaggctgagggcttccctgggagcggccggccaccgcccgagcaggcgtctggggccacgctgcagaagctgctctcctacaccaagcccgacgtggccttcctcgtggccgcctccttcttcctcatcgtggcagctctgggagagaccttcctgccctactacacgggccgcgccattgatggcatcgtcatccagaaaagcatggatcagttcagcacggctgtcgtcatcgtgtgcctgctggccattggcagctcatttgccgcaggtattcggggcggcatttttaccctcatatttgccagactgaacattcgccttcgaaactgtctcttccgctcactggtgtcccaggagacaagcttctttgatgagaaccgcacaggggacctcatctcccgcctgacctcggacaccaccatggtcagcgacctggtctcccagaacatcaatgtcttcctgcggaacacagtcaaggtcacgggcgtggtggtcttcatgttcagcctctcatggcagctctccttggtcaccttcatgggcttccccatcatcatgatggtgtccaacatctacggcaagtactacaagaggctctccaaagaggtccagaatgccctggccagagcgagcaacacggcggaggagaccatcagtgccatgaagactgtccggagcttcgccaatgaggaggaggaggcagaggtgtacctgcggaagctgcagcaggtgtacaagctgaacaggaaggaggcagctgcctacatgtactacgtctggggcagcgggctcacactgctggtggtccaggtcagcatcctctactacgggggccaccttgtcatctcaggccagatgaccagcggcaacctcatcgccttcatcatctacgagtttgtcctgggagattgtatggagtccgtgggctccgtctacagtggcctgatgcagggagtgggggctgctgagaaggtgttcgagttcatcgaccggcagccgaccatggtgcacgatggcagcttggcccccgaccacctggagggccgggtggactttgagaatgtgaccttcacctaccgcactcggccccacacccaggtcctgcagaatgtctccttcagcctgtcccccggcaaggtgacggccctggtggggccctcgggcagtgggaagagctcctgtgtcaacatcctggagaacttctaccccctggaggggggccgggtgctgctggacggcaagcccatcagcgcctacgaccacaagtacttgcaccgtgtgatctccctggtgagccaggagcccgtgctgttcgcccgctccatcacggataacatctcctacggcctgcccactgtgcctttcgagatggtggtggaggccgcacagaaggccaatgcccacggcttcatcatggaactccaggacggctacagcacagagacaggggagaagggcgcccagctgtcaggtggccagaagcagcgggtggccatggcccgggctctggtgcggaaccccccagtcctcatcctggatgaagccaccagcgctttggatgccgagagcgagtatctgatccagcaggccatccatggcaacctgcagaagcacacggtactcatcatcgcgcaccggctgagcaccgtggagcacgcgcacctcattgtggtgctggacaagggccgcgtagtgcagcagggcacccaccagcagctgctggcccagggcggcctctacgccaagctggtgcagcggcagatgctggggcttcagcccgccgcagacttcacagctggccacaacgagcctgtagccaacggcagtcacaaggcctgatggggggcccctgcttctcccggtggggcagaggacccggtgcctgcctggcagatgtgcccacggaggcccccagctgccctccgagcccaggcctgcagcactgaaagacgacctgccatgtcccatggatcaccgcttcctgcatcttgcccctggtccctgccccattcccagggcactccttacccctcctgggggatgtccagagactaggcctctcccctttacccctccagagaaggggcttccctgtcccggagggagacacggggaacgggattttccgtctctccctcttgccagctctgtgagtctggccagggcgggtagggagcgtggagggcatctgtctgccatcgcccgctgccaatctaagccagtctcactgtgaaccacacgaaacctcaactgggggagtgaggggctggccaggtctggaggggcctcaggggtgcccccagcccggcacccagcgctttcgcccctcgtccacccacccctggctggcagcctccctccccacacccgcccctgtgctctgctgtctggaggccacgtggatgttcatgagatgcattctcttctgtctttggtggatgggatggtggcaaagcccaggatctggctttgccagaggttgcaacatgttgagagaacccggtcaataaagtgtactacctcttacccct

SEQ ID NO: 117 - protein, 754 aa, Homo sapiens; identical to SEQ ID NO: 113

SEQ ID NO: 118 - DNA, 2275 bp, Homo sapiens
ggaaacggtctgcggagaaagatgctcctgggccgggttgggaccggcggcctcctcgttccgcctcccagttttcccactacgaggcagggactaatggctccactttacagacagctgaactgggtcgtgccttcacaggacggggagaggaagggactcggagccccaaggcctttgacttaaacgccgacccaccccccgccgtctgcccggagctcgtggagaaccagccgagctgaggacagtttaaagagctcggaggtccgactagttcccgctggtgcttcaatcatccagccctgtacgtttcagtttggatttagcatctaccccgggtccctgcctggcgcttccggtccctccgccacagtctgttggattacctcagattgccccagcctggcctcgccctgtggatgatgatggccttgcccccgtgagctacaacctggccttcagcacccgcccacctccaaccagcaggatgcggctgtggaaggcggtggtggtgactttggccttcatgagtgtggacatctgcgtgaccacggccatctatgtcttcagccacctggaccgcagcctcctggaggacatccgccacttcaacatctttgactcggtgctggatctctgggcagcctgcctgtaccgcagctgcctgctgctgggagccaccattggtgtggccaagaacagtgcgctggggccccggcggctgcgggcctcgtggctggtcatcaccctcgtgtgcctcttcgtgggcatctatgccatggtgaagctgctgctcttctcagaggtgcgcaggcccatccgggacccctggttttgggccctgttcgtgtggacgtacatttcactcggcgcatccttcctgctctggtggctgctgtccaccgtgcggccaggcacccaggccctggagccaggggcggccaccgaggctgagggcttccctgggagcggccggccaccgcccgagcaggcgtctggggccacgctgcagaagctgctctcctacaccaagcccgacgtggccttcctcgtggccgcctccttcttcctcatcgtggcagctctgggagagaccttcctgccctactacacgggccgcgccattgatggcatcgtcatccagaaaagcatggatcagttcagcacggctgtcgtcatcgtgtgcctgctggccattggcagctcatttgccgcaggtattcggggcggcatttttaccctcatatttgccagactgaacattcgccttcgaaactgtctcttccgctcactggtgtcccaggagacaagcttctttgatgagaaccgcacaggggacctcatctcccgcctgacctcggacaccaccatggtcagcgacctggtctcccagaacatcaatgtcttcctgcggaacacagtcaaggtcacgggcgtggtggtcttcatgttcagcctctcatggcagctctccttggtcaccttcatgggcttccccatcatcatgatggtgtccaacatctacggcaagtactacaagaggctctccaaagaggtccagaatgccctggccagagcgagcaacacggcggaggagaccatcagtgccatgaagactgtccggagcttcgccaatgaggaggaggaggcagaggtgtacctgcggaagctgcagcaggtgtacaagctgaacaggaaggaggcagctgcctacatgtactacgtctggggcagcgggctcacactgctggtggtccaggtcagcatcctctactacgggggccaccttgtcatctcaggccagatgaccagcggcaacctcatcgccttcatcatctacgagtttgtcctgggagattgtatggagtccgtgggctccgtctacagtggcctgatgcagggagtgggggctgctgagaaggtgttcgagttcatcgaccggcagccgaccatggtgcacgatggcagcttggcccccgaccacctggagggccgggtggactttgagaatgtgaccttcacctaccgcactcggccccacacccaggtcctgcagaatgtctccttcagcctgtcccccggcaaggtgacggccctggtggggccctcgggcagtgggaagagctcctgtgtcaacatcctggagaacttctaccccctggaggggggccgggtgctgctggacggcaagcccatcagcgcctacgaccacaagtacttgcaccgtgtggtatgtgcacgggcctgggccacacttctccgccctttctgcatc

SEQ ID NO: 119 - protein, 586 aa, Homo sapiens
MRLWKAVVVTLAFMSVDICVTTAIYVFSHLDRSLLEDIRHFNIFDSVLDLWAACLYRSCLLLGATIGVAKNSALGPRRLRASWLVITLVCLFVGIYAMVKLLLFSEVRRPIRDPWFWALFVWTYISLGASFLLWWLLSTVRPGTQALEPGAATEAEGFPGSGRPPPEQASGATLQKLLSYTKPDVAFLVAASFFLIVAALGETFLPYYTGRAIDGIVIQKSMDQFSTAVVIVCLLAIGSSFAAGIRGGIFTLIFARLNIRLRNCLFRSLVSQETSFFDENRTGDLISRLTSDTTMVSDLVSQNINVFLRNTVKVTGVVVFMFSLSWQLSLVTFMGFPIIMMVSNIYGKYYKRLSKEVQNARNTAEETISAMKTVRSFANEEEEAEVYLRKLQQVYKLNRKEAAAYMYYVWGSGLTLLVVQVSILYYGGHLVISGQMTSGNLIAFIIYEFVLGDCMESVGSVYSGLMQGVGAAEKVFEFIDRQPTMVHDGSLAPDHLEGRVDFENVTFYWHTQVLQNVSFSLSPGKVTALVGPSGSGKSSCVNINFYPLEGGRVLLDGKPISAYDHKYLHRVVCARAWATLLRPFCI

SEQ ID NO: 120 - DNA, 3385 bp, Homo sapiens
cccgtccatcagcctgtctcaacgcacgccagtctcagctccgaccttgcagcggcgcagcgcgggtgggaggcggggaggagcagcgggaagagcggagcgaggaccgcgtccggcgcagtcttcaatgagcagcgcggaaactgcaccccagacccgagcctgctgcgcgccccctcccagagctcacctggtgccaggtaacaggcctggcctcgccctgtggatgatgatggccttgcccccgtgagctacaacctggccttcagcacccgcccacctccaaccagcaggatgcggctgtggaaggcggtggtggtgactttggccttcatgagtgtggacatctgcgtgaccacggccatctatgtcttcagccacctggaccgcagcctcctggaggacatccgccacttcaacatctttgactcggtgctggatctctgggcagcctgcctgtaccgcagctgcctgctgctgggagccaccattggtgtggccaagaacagtgcgctggggccccggcggctgcgggcctcgtggctggtcatcaccctcgtgtgcctcttcgtgggcatctatgccatggtgaagctgctgctcttctcagaggtgcgcaggcccatccgggacccctggttttgggccctgttcgtgtggacgtacatttcactcggcgcatccttcctgctctggtggctgctgtccaccgtgcggccaggcacccaggccctggagccaggggcggccaccgaggctgagggcttccctgggagcggccggccaccgcccgagcaggcgtctggggccacgctgcagaagctgctctcctacaccaagcccgacgtggccttcctcgtggccgcctccttcttcctcatcgtggcagctctgggagagaccttcctgccctactacacgggccgcgccattgatggcatcgtcatccagaaaagcatggatcagttcagcacggctgtcgtcatcgtgtgcctgctggccattggcagctcatttgccgcaggtattcggggcggcatttttaccctcatatttgccagactgaacattcgccttcgaaactgtctcttccgctcactggtgtcccaggagacaagcttctttgatgagaaccgcacaggggacctcatctcccgcctgacctcggacaccaccatggtcagcgacctggtctcccagaacatcaatgtcttcctgcggaacacagtcaaggtcacgggcgtggtggtcttcatgttcagcctctcatggcagctctccttggtcaccttcatgggcttccccatcatcatgatggtgtccaacatctacggcaagtactacaagaggctctccaaagaggtccagaatgccctggccagagcgagcaacacggcggaggagaccatcagtgccatgaagactgtccggagcttcgccaatgaggaggaggaggcagaggtgtacctgcggaagctgcagcaggtgtacaagctgaacaggaaggaggcagctgcctacatgtactacgtctggggcagcgggtccgtgggctccgtctacagtggcctgatgcagggagtgggggctgctgagaaggtgttcgagttcatcgaccggcagccgaccatggtgcacgatggcagcttggcccccgaccacctggagggccgggtggactttgagaatgtgaccttcacctaccgcactcggccccacacccaggtcctgcagaatgtctccttcagcctgtcccccggcaaggtgacggccctggtggggccctcgggcagtgggaagagctcctgtgtcaacatcctggagaacttctaccccctggaggggggccgggtgctgctggacggcaagcccatcagcgcctacgaccacaagtacttgcaccgtgtgatctccctggtgagccaggagcccgtgctgttcgcccgctccatcacggataacatctcctacggcctgcccactgtgcctttcgagatggtggtggaggccgcacagaaggccaatgcccacggcttcatcatggaactccaggacggctacagcacagagacaggggagaagggcgcccagctgtcaggtggccagaagcagcgggtggccatggcccgggctctggtgcggaaccccccagtcctcatcctggatgaagccaccagcgctttggatgccgagagcgagtatctgatccagcaggccatccatggcaacctgcagaagcacacggtactcatcatcgcgcaccggctgagcaccgtggagcacgcgcacctcattgtggtgctggacaagggccgcgtagtgcagcagggcacccaccagcagctgctggcccagggcggcctctacgccaagctggtgcagcggcagatgctggggcttcagcccgccgcagacttcacagctggccacaacgagcctgtagccaacggcagtcacaaggcctgatggggggcccctgcttctcccggtggggcagaggacccggtgcctgcctggcagatgtgcccacggaggcccccagctgccctccgagcccaggcctgcagcactgaaagacgacctgccatgtcccatggatcaccgcttcctgcatcttgcccctggtccctgccccattcccagggcactccttacccctgctgccctgagccaacgccttcacggacctccctagcctcctaagcaaaggtagagctgcctttttaaacctaggtcttaccagggtttttactgtttggtttgaggcaccccagtcaactcctagatttcaaaaacctttttctaattgggagtaatggcgggcactttcaccaagatgttctagaaacttctgagccaggagtgaatggcccttccttagtagcctgggggatgtccagagactaggcctctcccctttacccctccagagaaggggcttccctgtcccggagggagacacggggaacgggattttccgtctctccctcttgccagctctgtgagtctggccagggcgggtagggagcgtggagggcatctgtctgccatcgcccgctgccaatctaagccagtctcactgtgaaccacacgaaacctcaactgggggagtgaggggctggccaggtctggaggggcctcaggggtgcccccagcccggcacccagcgctttcgcccctcgtccacccacccctggctggcagcctccctccccacacccgcccctgtgctctgctgtctggaggccacgtggatgttcatgagatgcattctcttctgtctttggtggatgggatggtggcaaagcccaggatctggctttgccagaggttgcaacatgttgagagaacccggtcaataaagtgtactacctcttacccctaa

SEQ ID NO: 121 - protein, 711 aa, Homo sapiens; identical to SEQ ID NO: 115

SEQ ID NO: 122 - DNA, 2290 bp, Homo sapiens
ggaaacggtctgcggagaaagatgctcctgggccgggttgggaccggcggcctcctcgttccgcctcccagttttcccactacgaggcagggactaatggctccactttacagacagctgaactgggtcgtgccttcacaggacggggagaggaagggactcggagccccaaggcctttgacttaaacgccgacccaccccccgccgtctgcccggagctcgtggagaaccagccgagctgaggacagtttaaagagctcggaggtccgactagttcccgctggtgcttcaatcatccagccctgtacgtttcagtttggatttagcatctaccccgggtccctgcctggcgcttccggtccctccgccacagtctgttggattacctcagattgccccagcctggcctcgccctgtggatgatgatggccttgcccccgtgagctacaacctggccttcagcacccgcccacctccaaccagcaggatgcggctgtggaaggcggtggtggtgactttggccttcatgagtgtggacatctgcgtgaccacggccatctatgtcttcagccacctggaccgcagcctcctggaggacatccgccacttcaacatctttgactcggtgctggatctctgggcagcctgcctgtaccgcagctgcctgctgctgggagccaccattggtgtggccaagaacagtgcgctggggccccggcggctgcgggcctcgtggctggtcatcaccctcgtgtgcctcttcgtgggcatctatgccatggtgaagctgctgctcttctcagaggtgcgcaggcccatccgggacccctggttttgggccctgttcgtgtggacgtacatttcactcggcgcatccttcctgctctggtggctgctgtccaccgtgcggccaggcacccaggccctggagccaggggcggccaccgaggctgagggcttccctgggagcggccggccaccgcccgagcaggcgtctggggccacgctgcagaagctgctctcctacaccaagcccgacgtggccttcctcgtggccgcctccttcttcctcatcgtggcagctctgggagagaccttcctgccctactacacgggccgcgccattgatggcatcgtcatccagaaaagcatggatcagttcagcacggctgtcgtcatcgtgtgcctgctggccattggcagctcatttgccgcaggtattcggggcggcatttttaccctcatatttgccagactgaacattcgccttcgaaactgtctcttccgctcactggtgtcccaggagacaagcttctttgatgagaaccgcacaggggacctcatctcccgcctgacctcggacaccaccatggtcagcgacctggtctcccagaacatcaatgtcttcctgcggaacacagtcaaggtcacgggcgtggtggtcttcatgttcagcctctcatggcagctctccttggtcaccttcatgggcttccccatcatcatgatggtgtccaacatctacggcaagtactacaagaggctctccaaagaggtccagaatgccctggccagagcgagcaacacggcggaggagaccatcagtgccatgaagactgtccggagcttcgccaatgaggaggaggaggcagaggtgtacctgcggaagctgcagcaggtgtacaagctgaacaggaaggaggcagctgcctacatgtactacgtctggggcagcgggaatgtctccttcagcctgtcccccggcaaggtgacggccctggtggggccctcgggcagtgggaagagctcctgtgtcaacatcctggagaacttctaccccctggaggggggccgggtgctgctggacggcaagcccatcagcgcctacgaccacaagtacttgcaccgtgtgatctccctggtgagccaggagcccgtgctgttcgcccgctccatcacggataacatctcctacggcctgcccactgtgcctttcgagatggtggtggaggccgcacagaaggccaatgcccacggcttcatcatggaactccaggacggctacagcacagagacaggggagaagggcgcccagctgtcaggtggccagaagcagcgggtggccatggcccgggctctggtgcggaaccccccagtcctcatcctggatgaagccaccagcgctttggatgccgagagcgagtatctggtgagtcacagggtggtgggcaatgcgggggcaggagcggctccaggtggccagagcccccatcgcccagcagatggatgc

SEQ ID NO: 123 - protein, 595 aa, Homo sapiens
MRLWKAVVVTLAFMSVDICVTTAIYVFSHLDRSLLEDIRHFNIFDSVLDLWAACLYRSCLLLGATIGVAKNSALGPRRLRASWLVITLVCLFVGIYAMVKLLLFSEVRRPIRDPWFWALFVWTYISLGASFLLWWLLSTVRPGTQALEPGAATEAEGFPGSGRPPPEQASGATLQKLLSYTKPDVAFLVAASFFLIVAALGETFLPYYTGRAIDGIVIQKSMDQFSTAVVIVCLLAIGSSFAAGIRGGIFTLIFARLNIRLRNCLFRSLVSQETSFFDENRTGDLISRLTSDTTMVSDLVSQNINVFLRNTVKVTGVVVFMFSLSWQLSLVTFMGFPIIMMVSNIYGKYYKRLSKEVQNARNTAEETISAMKTVRSFANEEEEAEVYLRKLQQVYKLNRKEAAAYMYYVWGSGNVSFSLSPGKVTALVGPSGSGKSSCVNINFYPLEGGRVLLDGKPISAYDHKYLHRVISLVSQEPVLFARSITDNISYGLPTVPFEMVVEAAQKANAHGFIMELQDGYSTETGEKGAQLSGGQKQRVAMARALVRNPPVLILDEATSALDAESEYLVSHRVVGNAGAGAAPGGQSPHRPADGC

SEQ ID NO: 124 - DNA, 3514 bp, Homo sapiens
cccgtccatcagcctgtctcaacgcacgccagtctcagctccgaccttgcagcggcgcagcgcgggtgggaggcggggaggagcagcgggaagagcggagcgaggaccgcgtccggcgcagtcttcaatgagcagcgcggaaactgcaccccagacccgagcctgctgcgcgccccctcccagagctcacctggtgccaggtaacaggcctggcctcgccctgtggatgatgatggccttgcccccgtgagctacaacctggccttcagcacccgcccacctccaaccagcaggatgcggctgtggaaggcggtggtggtgactttggccttcatgagtgtggacatctgcgtgaccacggccatctatgtcttcagccacctggaccgcagcctcctggaggacatccgccacttcaacatctttgactcggtgctggatctctgggcagcctgcctgtaccgcagctgcctgctgctgggagccaccattggtgtggccaagaacagtgcgctggggccccggcggctgcgggcctcgtggctggtcatcaccctcgtgtgcctcttcgtgggcatctatgccatggtgaagctgctgctcttctcagaggtgcgcaggcccatccgggacccctggttttgggccctgttcgtgtggacgtacatttcactcggcgcatccttcctgctctggtggctgctgtccaccgtgcggccaggcacccaggccctggagccaggggcggccaccgaggctgagggcttccctgggagcggccggccaccgcccgagcaggcgtctggggccacgctgcagaagctgctctcctacaccaagcccgacgtggccttcctcgtggccgcctccttcttcctcatcgtggcagctctgggagagaccttcctgccctactacacgggccgcgccattgatggcatcgtcatccagaaaagcatggatcagttcagcacggctgtcgtcatcgtgtgcctgctggccattggcagctcatttgccgcaggtattcggggcggcatttttaccctcatatttgccagactgaacattcgccttcgaaactgtctcttccgctcactggtgtcccaggagacaagcttctttgatgagaaccgcacaggggacctcatctcccgcctgacctcggacaccaccatggtcagcgacctggtctcccagaacatcaatgtcttcctgcggaacacagtcaaggtcacgggcgtggtggtcttcatgttcagcctctcatggcagctctccttggtcaccttcatgggcttccccatcatcatgatggtgtccaacatctacggcaagtactacaagaggctctccaaagaggtccagaatgccctggccagagcgagcaacacggcggaggagaccatcagtgccatgaagactgtccggagcttcgccaatgaggaggaggaggcagaggtgtacctgcggaagctgcagcaggtgtacaagctgaacaggaaggaggcagctgcctacatgtactacgtctggggcagcgggctcacactgctggtggtccaggtcagcatcctctactacgggggccaccttgtcatctcaggccagatgaccagcggcaacctcatcgccttcatcatctacgagtttgtcctgggagattgtatggagtccgtgggctccgtctacagtggcctgatgcagggagtgggggctgctgagaaggtgttcgagttcatcgaccggcagccgaccatggtgcacgatggcagcttggcccccgaccacctggagggccgggtggactttgagaatgtgaccttcacctaccgcactcggccccacacccaggtcctgcagaatgtctccttcagcctgtcccccggcaaggtgacggccctggtggggccctcgggcagtgggaagagctcctgtgtcaacatcctggagaacttctaccccctggaggggggccgggtgctgctggacggcaagcccatcagcgcctacgaccacaagtacttgcaccgtgtgatctccctggtgagccaggagcccgtgctgttcgcccgctccatcacggataacatctcctacggcctgcccactgtgcctttcgagatggtggtggaggccgcacagaaggccaatgcccacggcttcatcatggaactccaggacggctacagcacagagacaggggagaagggcgcccagctgtcaggtggccagaagcagcgggtggccatggcccgggctctggtgcggaaccccccagtcctcatcctggatgaagccaccagcgctttggatgccgagagcgagtatctgatccagcaggccatccatggcaacctgcagaagcacacggtactcatcatcgcgcaccggctgagcaccgtggagcacgcgcacctcattgtggtgctggacaagggccgcgtagtgcagcagggcacccaccagcagctgctggcccagggcggcctctacgccaagctggtgcagcggcagatgctggggcttcagcccgccgcagacttcacagctggccacaacgagcctgtagccaacggcagtcacaaggcctgatggggggcccctgcttctcccggtggggcagaggacccggtgcctgcctggcagatgtgcccacggaggcccccagctgccctccgagcccaggcctgcagcactgaaagacgacctgccatgtcccatggatcaccgcttcctgcatcttgcccctggtccctgccccattcccagggcactccttacccctgctgccctgagccaacgccttcacggacctccctagcctcctaagcaaaggtagagctgcctttttaaacctaggtcttaccagggtttttactgtttggtttgaggcaccccagtcaactcctagatttcaaaaacctttttctaattgggagtaatggcgggcactttcaccaagatgttctagaaacttctgagccaggagtgaatggcccttccttagtagcctgggggatgtccagagactaggcctctcccctttacccctccagagaaggggcttccctgtcccggagggagacacggggaacgggattttccgtctctccctcttgccagctctgtgagtctggccagggcgggtagggagcgtggagggcatctgtctgccatcgcccgctgccaatctaagccagtctcactgtgaaccacacgaaacctcaactgggggagtgaggggctggccaggtctggaggggcctcaggggtgcccccagcccggcacccagcgctttcgcccctcgtccacccacccctggctggcagcctccctccccacacccgcccctgtgctctgctgtctggaggccacgtggatgttcatgagatgcattctcttctgtctttggtggatgggatggtggcaaagcccaggatctggctttgccagaggttgcaacatgttgagagaacccggtcaataaagtgtactacctcttacccctaa

SEQ ID NO: 125 - protein, 754 aa, Homo sapiens; identical to SEQ ID NO: 113

SEQ ID NO: 126 - DNA, 3351 bp, Homo sapiens
ggaaacggtctgcggagaaagatgctcctgggccgggttgggaccggcggcctcctcgttccgcctcccagttttcccactacgaggcagggactaatggctccactttacagacagctgaactgggtcgtgccttcacaggacggggagaggaagggactcggagccccaaggcctttgacttaaacgccgacccaccccccgccgtctgcccggagctcgtggagaaccagccgagctgaggacagtttaaagagctcggaggtccgactagttcccgctggtgcttcaatcatccagccctgtacgtttcagtttggatttagcatctaccccgggtccctgcctggcgcttccggtccctccgccacagtctgttggattacctcagattgccccagcctggcctcgccctgtggatgatgatggccttgcccccgtgagctacaacctggccttcagcacccgcccacctccaaccagcaggatgcggctgtggaaggcggtggtggtgactttggccttcatgagtgtggacatctgcgtgaccacggccatctatgtcttcagccacctggaccgcagcctcctggaggacatccgccacttcaacatctttgactcggtgctggatctctgggcagcctgcctgtaccgcagctgcctgctgctgggagccaccattggtgtggccaagaacagtgcgctggggccccggcggctgcgggcctcgtggctggtcatcaccctcgtgtgcctcttcgtgggcatctatgccatggtgaagctgctgctcttctcagaggtgcgcaggcccatccgggacccctggttttgggccctgttcgtgtggacgtacatttcactcggcgcatccttcctgctctggtggctgctgtccaccgtgcggccaggcacccaggccctggagccaggggcggccaccgaggctgagggcttccctgggagcggccggccaccgcccgagcaggcgtctggggccacgctgcagaagctgctctcctacaccaagcccgacgtggccttcctcgtggccgcctccttcttcctcatcgtggcagctctgggagagaccttcctgccctactacacgggccgcgccattgatggcatcgtcatccagaaaagcatggatcagttcagcacggctgtcgtcatcgtgtgcctgctggccattggcagctcatttgccgcaggtattcggggcggcatttttaccctcatatttgccagactgaacattcgccttcgaaactgtctcttccgctcactggtgtcccaggagacaagcttctttgatgagaaccgcacaggggacctcatctcccgcctgacctcggacaccaccatggtcagcgacctggtctcccagaacatcaatgtcttcctgcggaacacagtcaaggtcacgggcgtggtggtcttcatgttcagcctctcatggcagctctccttggtcaccttcatgggcttccccatcatcatgatggtgtccaacatctacggcaagtactacaagaggctctccaaagaggtccagaatgccctggccagagcgagcaacacggcggaggagaccatcagtgccatgaagactgtccggagcttcgccaatgaggaggaggaggcagaggtgtacctgcggaagctgcagcaggtgtacaagctgaacaggaaggaggcagctgcctacatgtactacgtctggggcagcgggtccgtgggctccgtctacagtggcctgatgcagggagtgggggctgctgagaaggtgttcgagttcatcgaccggcagccgaccatggtgcacgatggcagcttggcccccgaccacctggagggccgggtggactttgagaatgtgaccttcacctaccgcactcggccccacacccaggtcctgcagaatgtctccttcagcctgtcccccggcaaggtgacggccctggtggggccctcgggcagtgggaagagctcctgtgtcaacatcctggagaacttctaccccctggaggggggccgggtgctgctggacggcaagcccatcagcgcctacgaccacaagtacttgcaccgtgtgatctccctggtgagccaggagcccgtgctgttcgcccgctccatcacggataacatctcctacggcctgcccactgtgcctttcgagatggtggtggaggccgcacagaaggccaatgcccacggcttcatcatggaactccaggacggctacagcacagagacaggggagaagggcgcccagctgtcaggtggccagaagcagcgggtggccatggcccgggctctggtgcggaaccccccagtcctcatcctggatgaagccaccagcgctttggatgccgagagcgagtatctgatccagcaggccatccatggcaacctgcagaagcacacggtactcatcatcgcgcaccggctgagcaccgtggagcacgcgcacctcattgtggtgctggacaagggccgcgtagtgcagcagggcacccaccagcagctgctggcccagggcggcctctacgccaagctggtgcagcggcagatgctggggcttcagcccgccgcagacttcacagctggccacaacgagcctgtagccaacggcagtcacaaggcctgatggggggcccctgcttctcccggtggggcagaggacccggtgcctgcctggcagatgtgcccacggaggcccccagctgccctccgagcccaggcctgcagcactgaaagacgacctgccatgtcccatggatcaccgcttcctgcatcttgcccctggtccctgccccattcccagggcactccttacccctcctgggggatgtccagagactaggcctctcccctttacccctccagagaaggggcttccctgtcccggagggagacacggggaacgggattttccgtctctccctcttgccagctctgtgagtctggccagggcgggtagggagcgtggagggcatctgtctgccatcgcccgctgccaatctaagccagtctcactgtgaaccacacgaaacctcaactgggggagtgaggggctggccaggtctggaggggcctcaggggtgcccccagcccggcacccagcgctttcgcccctcgtccacccacccctggctggcagcctccctccccacacccgcccctgtgctctgctgtctggaggccacgtggatgttcatgagatgcattctcttctgtctttggtggatgggatggtggcaaagcccaggatctggctttgccagaggttgcaacatgttgagagaacccggtcaataaagtgtactacctcttacccct

SEQ ID NO: 127 - protein, 711 aa, Homo sapiens; identical to SEQ ID NO: 115

SEQ ID NO: 128 - DNA, 22313 bp, Mus musculus
  misc_feature (1)...(22313): n = A,T,C or G
tctacaagcagcttctcatgtgtttgtagtgaggctgcctacaatagagaggacagcttgttccccattttgaggctccagctaaaagtgcatagaaaaatccatggctcctttgtgtttagtggtcagaaggattaacaagactacttctcactcctgggctcactcctgggtcttataaggagctgaaccaaaacatatggggaaaatcatatgtcatcatgagaatgttgttaaacaccgtccatcactgtgccacacactgatatggtctatgaagcacagaattgtgcaaacaggacagttacagtgtgataatgttatcttacagcgtaaggtttactgctttcttaaaagcattgaagttagaggggtaaacgttgaaactataataaagactgctctaactttcctttattcttcatttcttttgttttcaatctcctgaaaattatttgctctccttatttgcactgcatctttttgcactctcccatttaaaagaaggacctccataaaaccttttcagaattgggggatttcagtggtagaacatatcaaagattcagaccccagcataaaaacaaacaaacacccatcaccattataatctgtttatgctacattgaaagaataagccttgaacttggcaattaagcacctttttaacctactaagttttagagttcagcataagttagtagagatcactgatcattagtgaataaaacataccaggtgatggctcttaaaaaaaaaaaaaaaacaatccatttaacaaaacactagggcagcatggagggagcatgaagaataatgtgcaatagtatgtacaaccttctgtgctttaacaaggccacaagcaaaatagtattccatcaagacagcttctactttggcatgtacagaaagaccaggatacagccctaactctagttcatttgccacaaccttaaacccatacatacatcttttcagcatgagatccgagttaaaaaatgtttaagggtctactgtttgtaaagcactattctgctcactcggagattgatcagagcaccgaactaaatttgcagcccctttagggagctgaacaacccccttttttaggggttgtacttaagatatcctgcatattagctaaatatattgtgatttaaaatagtagcaaagtcatagttgtgaagtaacaacaaaattaattttttggtgggggggtcatcacaatatgaggaactgtattaaaaagtcacagcattaggaagattgctaatctaaccactgaacttatacttgatgcctgggatggccagcagaggacagtcaggtagccaaggtttttaagaaagatagatgtgtcagaggatgagcactgatgtactttaaaatcaagagaacaccccttgcaaagcagttatattggagggtttagaggtgttaaaacctttacacttctggaggtgaacagggcagagaccagtgcacacattcatcttagtggcacttagccccgattataagaaaaggttgcctgatgttacagtttgaagtagagccaatagtacttactgatagagtggaagagggcagagagagaaaggagtcagtgggaggaaaggtgatgccaccaaccacagcagggacagatttagaagaacaagaggctggacaacttttgtcatctgaagttcaaaatgcttactgataaagatgagtaagcaccaaggctcagccaacagcatacacgtttgacagtcaccggggtatcagtattaaggccatgagactatatgaagtcattaagattatgaggacagatagagaagaggttcaaggacagagcttttgagaggaagaaacaaactttgcaatgaagctgatgtgggaggaggagactttctttcagagaggaagctccgagcctgtaggagcaggggcagacctacaaaagtcagctaccaaggcacccaccttcttccccaggaaccagcctgttgaacaaagcctcttaaaaccctcctgggatggaagccttctgaggtaaacttggggtgaggggtgtcctgaaggctctggtcctcttattttgacatgctgaatggctggtgagatttgaacatctagaagcaacacagggcaactggcccaaactgtccaccacaccatgactccattactttctctccccatcccacacccctccatgtagcctctattgactcagtggtgatcctcctatttctgcctcctgagtatgagattataggcatatgccaacaggtcaaactattctttatagcagaaaagagttgccataggataagttattcttaaaccccaaatcagaggaactgggaatactgtacagttttacatgagaggtaacaaattatccacatgtagtagcttagaaaagagcatttgccatcaaacctgaaaatctgagttggatccctagaatccatgtatgtggtggaaggtcagaagtcctgaaagttatcttctgacatttccacatgtgtgcctatatgtgcacaaacatgtctctctctctctgtctctttctctctctctcacactacatatgcacacatacatctcacacacacaactatcacatatacaaatcatataacacatatcacacatatcatatacagatcgcacacatcataacatacacataaagtaaaacaaataaatgtaaaaaagtttatgaatttttaaaaagatatattttatttttaattatgtggatgtgggggtgcatatgtgtatgtgagtgcaggtgtccccaggaggccagaggcatcagacccctgtgggtctggagttacaggcagttgtgagccatcagacatggatgctgagaccaaactcgcgttcccttaaagagcattatactctcttaacacagtaccatctctccatcccccccatttttaaattaaacaacatctatttactatttcagagcttctgactatctgaagtctgagcacagctgctccaggggaaagaagttggagaggtgagaagatgacctattcttggatctataagtctggctaacaactcaggcctgggggtgttcataggctcaggtaggcagggaacttgtacctgatgtttagctaaatcgacaaagcagtgaattgccatttaaatatctatgcttatatccacagacaagagtgacttccattcagtgagggaagtccctccaaacaaaggacagtggtgaatacagacactcatggctgctcaagatacagaaaataagcaatggttatgggtccagcctgaagcaagacaggaacaccatctcctctaaagctcaggaacattgcagaggaaaatgtgggaagtaagtaagagccagacaatagagtaaaggctatgaaacaccattctctagactcaatacaagtattgcaattattaaccctcaactactatagttacctgcatttggacccacccatgtaagatcagttctgggctggagagatggctcagaggttaagagcactgactgctcttccagaggtcttgagttcattcccagcaacgacatggtggccttcaaccatctgtaatgggatccaatatcctcttctgatgtctgaagacaatgacagtgtactcatgtacataaaataaataaatctttaaaatatcatgtctatcaacaataagtcaaagaagagggagtggggagggctccctgggctctaccctttacctctgagctattggtagtgattgaccctgcaagatgaggaaccactgtctttagttgagtacccactgctgagaccactggcctccaaattcatggtcgcacagacagccttgggtaatctcagtgggtcacaaaacaaagtaaatgctatgcgtgtaagacaggtttgtggggagagtgttggtgaggtgattgggaagtgggggatgcgagtgggcaagatgtgttttgtgtgtgtgtgaaactgtctacgacatttaaataataacactatgtagtagtactggtagtctagacacagaccactgggctccctgtctaagtcacagcatgcttaaaccagtgttggtcaggccacactcccatctagaagcttgatgaggaaggatctgtttctaagcttccttaggctgttagaacaattgctttccttgtttgcttctttccagccagcaatggaaaaacatattcaatctctctttagagaagatccagttctcttttaaagacctcaactgaggctaacagtccagccactctcccctacatggtctgctctggaccaaggagacacctatttaatctgactcccaagaacacagcacatggcagacatacacatggacacatacctaagcatgcaccgacatgcctttatctgtctgagccagggctatacggtagaatccccctttctttcattcagagtcaactgtttaggaccttaattacacttacaaagtcctttcctctttgcaatggaatgtaaaacccaattgtcatattttattagttgaagcaagtcacgagttttgctcacactcaggagcaggtagagatcatcatgaccacattggactttttcccattactgtgatgggccaagaaactaaactttgttccattctgccttagacacacttcttatggctgtaaagaagaaaaatatacctgacataaagaagaaaagaaagagttgttgtggctcagagtttcaaaggctctgttgactgtggccagctgtgaggccatcacatgggaacacggggcagaggatgcttaaatcctggcaggaaggagacaagagaaagaaagggacaaggaactaggtacatccttcagaagggcatccctagttacctacttcttccagctaggcaccagctcctaacatttctgctgccttctgaagtagcaccactaactgctgatcaagcctttgatgcccgagctttagaggggtgaagaagagggaggaggaggggggagggaatggaagggagggtcaacttttcatacctaagctacaaattcaaaggaaatactgatcctaaggaaagacacatttttaagtgatggtaaatcttgtccaaataacgttctgaaataaaaatggaggtaaactcacaggcttgctttaaaacaaacgaacaacaacaacaacaacaacaacaaaaaaccccaaagccccaaaacaaaaccaaaaaaagacttatcaagcctatgcagataaacaagagcaacaagaagttgaagccttatgatttcataacttgggatttccgttctaggcagtagactatgagttgactcacaccgaaataacaagctcctttccttcagtagcactggctatagtttgaaaggaggaaacactacaattatgtattgtagaaccagtagtaggaatgtatgtgtgataaggatgaggatgttgtcacaaaaactctagtatggcaaaacagcaaaataatttaataattgtctagtacctacttccccatgactaccagatataaccatttagagatttcataaatatgattaaaatgtcactctagtcctccatacttcaacacctgggactaccaggagtagttttaaaaatagcattaggaaggtatgatgctgcatacctgtaattccagcactcaggaggctgaggcagaaggattgagagcttgagactctgtcagaaacaaacagtaaccgtgctgcttagttttatgttaatttgccacaaactagagccatccgagaggacagaacctcaattgagaaactgcttccataaaattgagctacaggtaagtctgtagcatattttcttaattagtggctcatgtgggagggtccagcccattgtaagaggtgccatccctgagctgaccacaggttctgtaagagagctgtctaaacaagccatgggaagcaaggcagcaagcagcactctcccgtgggctctgcagcagctcctgcctccaggctccttcctgatttgagttcctgccttggcttccccccagtggactgtgattcaggatacgtaaaccaaggaaaccctttccttcccaagttgccatggtgattttatcacagcaaaagaaaccctatctaaagcaatatctctacatactggactcgttaggtggaatataatccaggactctaatataaagctgcaagcaagcaggcgggctgagtgcaattcctccttccaaccataatactcacagaagacaatcactgatgaaacattctagggaaattcagcaatgaggtaacacaagcttggctgagtcagagtgtgtgacatgaacagtttttgaataccagatttggataaaatgccatttttttaacaataaggctaaacatagcattaagtatagtttttgagggataaatactatacttttgctatgttatacccattttaaacttcaaatagctgcctttaatgggacactatagtcctatgtttcatctgaattgcataaacagtgcatggttcgactcagcttccattcagatgagatgggacgttcagcataactagctgatgacagtgaataccattttgtcctaaaatccagttgaaacataggtgtgatggcgactcttggttgtcaacttcattcagtacatctggaattatctaaaattcaaaaacagagggcaccccagtgaagaaatttttgcttaatttgaaataggaagatccacttctaatccagatcctgaggcaggaaaacacactcctttaatatggaccttgaggtgacaagacacactcctttaatacaggtcttgaggtgggaaaggcacaccttttatctgggccataccttgtgtgggaagcttagacatggaaaaaggaagcttttgctcatcgcctgcttgctctagccttgctagcatgtctattccttcactgccattagagcctactttagtgggatcccagcacattcagacgaccaactgagacatctagcctcaaggacggaacaacttctagattcttggactttttgttcatagccagccattgttgtattagttggactacatactgcctgtaagtcaacctaataaatcccctttgtatatatgtatgtgtgtatatacatatgcatacatatatattgattttatatgttccactactctaaagaaccctgattaatacaatggacataccaagtagatcatgaggtctttgtagagaaaggaccagaaattttttagggcttatatttttgaagtgatgttaaaggtgacttttctgagaattcatgcacaggactgtagggtcatgaggtggtgattaattctcagattctttttaattcatgacacccactgtactactgaatgtagggtgttgaggacaccaagctgatgaagtcatagtctctgctgtcacatcatcttctaattctttgtcagctgcatccttccagagaacttctaagaaatgtctaatgggtagagccctggagttctagggaacacagttcattagtctccaaatggtgactcggagtggtttgtgtcattatggtattttaaagatggtattttagtgccagttacctgtattgttcctggaacaaaattaagaaaggaagcgtttattcctgggtacagttagtccatcatggggaaggcttgacagccagagctagaggtggttggtcacatggcatcctcagtcaggaatgaaccaagaatgaccatgctcagtgtagctgttttcctttttacatgcagtgaagaccccgagcccatggaatggttttatccatcctaatctagatgacccatcacagtcacgcccagaggcttgttttagtaatggctcttgatcaccattaaggtaacggtcactgttaaccatagaaattgaagcctaaacttcaatattggagattttgcccctggatgctgttttgtagggctaggagatcaaattctgagcctgggcctggaacaagctaggcaactgnnnnnnnnnnnnnnnnnnnnnnnnnnnnnnnnnnnnnnnnnnnnnnnnnnnnnnnnnnnnnnnnnnnnnnnnnnnnnnnnnnnnnnnnnnnnnnnnnnnnnnnnnnnnnnnnnnnnnnnnnnnnnnctcccctctccgctttatttacttttgagtgctctaactgcatgtacacctcatgccagaagagggcatcagatcccattatagatgattgtgggccacatttagttgctgggaattgaactctggacctctggaaggatagccagtgtgcttaaccactgagccaactccccagtcccaagggattctttaacaaagcatcgccatttaaagctttaaggcgtaagtatgaggtacacagcacccagggtaagtcatacactgacatttgctcctttactcaacttttgtctcttggggacatctccaataagtgaactagaaaaccaacctataaattatccattaagttaagattaagagaatttgaaaatattttgtccacaagaataaaaacttgccgggtatggtggcgcacgcctttaatcccagcactcgggaggcagaggcagacggatttctaagttcgaggccagcctggtctacaaagtgagttccaagacagtcaggactacacagagaaaccctgtctcgaaaaaccacccctccccccgcaaaaaaaatcttaaggataactcacatgtacctctgcaaaatttacttctgtaactgtaagctacccagtgacctcaatattagcactgttaagaatgcaagcatatgggctgcaatttcaccactctccgtgactagtaggttcaggcaatgcttttgtatttactgaataagctcataaaacaaagagagttttgagctatccagtaaaagtttgcattaaaaattgtttttactttgtaactcctgcttgcagttacgagggtttgccttctacctacaagttgctattatctcaaaggtgaaatttgagcacatggctaaaatgtactacagttacagcttcatgattcagcttcagtaattcagagtgagctcatagacagtaaaggtggtgtcatactcttctgcctgtgatgggacgctcagggaacatcgtgagcacctcgaatttccatgatggcacctctgaataccacagaatttctctcttagctcttacttgatcagaaggagccttcttcaggaaggattctaagaacggtgaatttggctcgttaaacatgcgatcaccagctccccaccttacatggagtaggcagaaatttcaccaactttttgtggaaaagattccaacttggtactgtgccaccactacacacaaatgcgattttttttttttttttcttctccctggagtttcaaattctcacaaccaaccaaaaccaaatcaaaccagccatcagggcaccaaaagactactactgggaataagcaggtttacctgaaacttgcatataaacactgaagcaagctttgcccggcatgtctggacacttaaaaatatgcttactaacaacagctagactggagtgcattaatccctggaagtaaaatttaaaaagcagccccttaacacaaagggcacgaaacgacaatcaaaagatgtccacaaccagaaaaacaattggcaggctgtttcagtcagagctgaggacacttgaaccactgcaaagccctccgcaccagaaggctccacaaactacctagagctggctcaggaccccaccaaccgggtttcagcaccaccttcgtcccgtgggctccctcccgcgtagctccgcccctttccgctcaactctgccttgctttggtggagcgagggtctgggtgtcaacgtctgctaatttgcataacccaatggcctgactgcatgcaaatgaagctggacctggttggctgagggctagccccatatctccggaatcgggccctttgtcctccagtggccccgaggcagcagtgcagagttccccagcgaggctaggcgagcagccggccggccggagcggagaagggagggtgggagcgagcgcagagccggcgccgcgcactgtgggggccaggagcagcccgcgcgccgagggagggactcgcacttgcaatatgactttggaggaattctcggctgcagagcagaagaccgaaaggtaagtgtgcctgccgactcggtggccgccgcccctcccgcctcgcgtccggggacccggctgacccgctctcaccctgccgcccgcaggatggacacggtgggcgatgccctggaggaagtgctcagcaaggctcggagtcagcgcaccattacggtcggcgtgtacgaggctgccaagctgctcaacgtgtaagtggcccgcgttccccgctcgcccacccacccgcctctaccccgcgcccccctgagcgtatgcaactcaccgctgccccgctgcccgcagagacccccgataacgtggtactgtgcctgctggctgctgacgaagacgacgaccgggatgtggctctgcagatccatttcaccctcatccgtgcgttctgctgcgagaacgacatcaacatcctgcgggtcagcaacccgggtcggctagctgagctgctgctactggagaacgacgcgggcccggcggagagcgggggcgccgcgcagaccccggacctgcactgtgtgctggtgacggtaagagacccggggctgcagcccagaatctgctggggtggaccttgtccgagctgaacgctgatctcgcgggggttgtgatagggtacggagcgtgtctaagctcgtgggtggcctccagcggcggaagatatccctgtgagtcagcaagctgcccagctgctacctctgcttacctctgcacaacctcgcgtggctaattctttgagcagaacagattagataaagccaaataaattcccggtttacccttcgttaagaagttagcttcattcttcatttgctgtcaaagctaaaggtagaagtggtgtaggagacagaccttattaattccctggatatagatagatactctgaagtgtaccgagtggaattcttttctttgctgctcttgagtttgtttaaacgagctccctcctccccaccgcttaaaaatgtgtggtgggttgatagtgttttcagaaagaaccgtgctgtctaggtcttctggttttttgtttttgtactctttctcttctgacttgtgtagggaagtgactgcctggttacttgttgctgccagtaaaatgtgctattcatcgtcagggaagataagagttcagcagctgcctgccctgcagccctcaccgtgcacacagcctgagaatgcttttcaggagtcttttacttatgacccaccagggtacatgcttggaagggaggtcttaagaatggtaacctcatgcagaatggggtagttaatatgcaaaactctgtgtagttccgtgcacgttacaggtgtttagactatgctagatgctgtttttaacagaatgttcggggtttggccctttcaaaagtagcacaattagtagcagaagctgattattttccggggaagtaattttttcaaaatctgttcacagaacccacattcatcacaatggaaggatcctgccttaagtcaacttatttgtttttgccgggaaagtcgctacatggatcagtgggtgcccgtgattaatctcccggaacggtgatggcatccgaatggaaataactgaaccaaattgcactgaagttttgaaatacctttgtagttactcaagcagtcactccccacgctgatgcaaggattacagaaactgatgtcaaggggccgagttcaactgcacgagggctcagagatgactttgcagagggagagagaggtgagcctgaagaaggaagctgcgagaaaagagaaatccaaggcaaaagggacaaaaactacaaagcactgcaagaaagaaaactgctaatttaggatggccaggttactttcaaataagccaaatattgctttgttgaaactttaaatgtatagcaatagtttgggtattttttttcttttttttttttggtctttatgccctcaaataaaaggaaagtaaaagaggattaatcatattttcaagccacagtttaaatgtattttgatgagatgttaaattctcagaagttttattataaatcttactaagttattttatgatgtgaaaggttatttatgataaagtttttgaagcacattatctaaaataaactggtatggaataattgtgtcatttctcaacgtgtggtttgtgttttacaatattgattattggacattctattgaagctttgctgtattttacactaggcaggaagaatggtgggggggggcggttgtagagggtcggggtaaggaaaaagggaatatggcaagattcaccttgcaaagtctaaattacagggaatgacttaaatgctataattaattgcatgcaaaacgtggaagcagagaggagggttaccaaagctgcttgaagatgagtgaagcttttactgaggaaaaaacatttcattggaggcatcaaagatcacagcctgcagagagacctacgagggtgtctctgcctgcctctggtgtaggcagataagtgagagagggttggaaaggtgggggttcagctcagatgctgacaggagttcttgcatcaccattatgtatttgagcttctttctgtgaacttgccacagtctgcagaaggaagtgacctggtcagtgttgtaggtagataacttggggaggtatggggtagtaaatagggtgagtggctggctatacagtaccagcgtaagggagaaccgtggcaaagggcaggttttgtcaagttgtagcctcttcccagagaatttcccctactgctgtgagaggtctgattatgtcagggaagaagtgtcagaggaaaaagaagaagaaaagacttcagtagaagaagcctttctactgtctggttagaaagcacctggtaattaactgtagctgggaggcagaggcaagggaagcaaaggtgtgtgctgaagacaaagcctggcagagctatagtctccactgtttgcccctctccctcccctcctcctccccctccctccctctctcttctcctctctctctggagctctctctttctctatttccctccnnnnnnnnnnnnnnnnnnnnctccctccctccctccctccctcccttcctctctggaactccttgggcccctactgtttgccagccttcttgtgaccatcagggagagcagaagaaaccacaaaacccttaagcttctgcccatcttgtataggcctatgagccttctgcttttctactcttaggaatgtggatttctaggccttatttagtctttgcttgaagacaatgtgtaatcccaaacaactggaataacaacatttacttttatattagcaggagatttgagagcaattcctttcgagcaagccctttagccttcccactagcggcttgttcggtttccacaactgttgtatttcatgaactaagttaaaccaagtaggacacgtggagaaaagcagctgtttgctggaaagcacatgagtggcagtcaggtctccaccagcacccccaccattcattcatgtgtaaaatgaagagcacattacccagcctacagagttgccttttatagctttgtcatctcttggaaggatgaacttaatatctggtccactgatgtatccatacattagatgatgaggtaatatttgtttaataaatgaatgattagaaatcattatgaacccgaggctgtagcttcagtgatagatagagcatgtacgagatcctgcaatatctctggctctggggaaataatcactacctggtacatggtatttgctcggatcatagcaacaggagaatattgaaggccttacagagagttgttacttatacatattattaaaaaggagtttgaggccgggcgtggtggcgcacgcctttaatcccagcactcgggaggcagaggcaggaggatttctgagttcgaggccagcctggtctacagagtgagttccaggacagccagggctacacagagaaaccctgtctcgaaaaaccaaaaaaaaaaaaaaaaagaaaaagaaaaaaaaaaaaaggaaaaaaaaaaaaaaggagtttgagtcatttaaccccagtgcttagtgagatgaagtagtgggataaaaccttcagattactccatctcttgaaaagctcaacaataagtagagttaggtattcttttgatttttgttttgttgttctttcataagataactcaaacataagttaaaacaaattatgagctgttggctcagtaggtagttgccaccgaagcctgacaacctgagtttgatcttggaaacccaagggagaagagacttgacctcttcaacttgtcctctgaccacagaagtgcatgacatgtgcacatgcacctatacacatacacacacacacacacacatacatacacacacaaacacacacacacacacacacacacacatacacacaaacacacatacttatacacacatacacacacatacatacacacacatacacatacatacacacacaaacacacacacacatacatacacacaaacacacatacttacacacacatacatacacacacatacacacaaacacacacatacatacacacatatacacacacatacacacacatacacacaaacacacatacatacacacacatacacacacatacatacacacacatacacacaaacccacacatacatacacacacatacacacatacacaaaaacacatacaacacacacacacacacacaccatcaccacaccacaccacattaataaaattcataaaaagctaaatctatgaaagagttaagtataaataaagtatgcctctaacttgtgccaatatttagttaattgctttagaaattattaaacaaggttggggcaggaggattactttgagtttaaggccactaggttacctagtaccaacccaccctggtatcctcttaaaaacacaaaagcaagcaactgacttccttacatgcaacaagaacaaagactttacacacctactgagatgtgctgtttgctgaaaagtggaaaatacctatttttccataggtgacttcatagattcagtattgcttctgctttgtctggctagtctgggtctttagtatgttaaagctccgtaatgaaaagagtccatgagagtaaccttttataataaactattttgcaagctaaaataaaaggtgctatttgtaggaagctagaaacttgtagagttgccttatgaccttactgtaaccttcatccttaaaaaaaaattgtattcttgccatataggaaaaggtttgttttcttcaagaacaaaacttgatagcactgatgcaacacaaagctgaatccctcacacaaaagctgaatttttcttttcctttaaacaattcgttcataaacataagaacttggttgaagttgtacttacgaaactaccaagagctctttagtgaatgtttactgtggtcattagaattgtctaaaaaagatcctttggcctcagggagctcacagtctagtgaaacagaaagcacattgatagggcctaaagtagagtccagcaacaaaaggtttaaaggactattgtggaagtttgaagggtagaagtttcctgagggcatataggacagaatggaggaaaaggttgtaagttctttgatcggagttagcgtttcattttgcaaacaccataaaaatgcttggctgatggattatatccaattctgctagatgctgcagagactagagatgtagcctataggacctcttggcactgagaagtttataatttgtaagaaagtcaaataagttcctaccagagatttaccggatgtctgtcatgtacagagtactgtgtaccagggctataaaagcagcagtaatttaccttcaaggatgcgcctagtttggtgcgtgtgtggtcgtgtgtgtgtgtttgtatgtgtatgtccccctatcttgacactgggtgaatagagaggtgcccaacacctaaggatttctgaggctggagacaggtccctaaagttgacccatttgccagggaaagtgaagtgctttgttgcagaaggagctcaggtgatggggttgacattcttcttaatgaaggagctcctggcatacttggagctagctcccaggacataccaagatagcttcgtgccaagtaccttaccaactaccattcgccagcactcacaacagtcctgtggcagtgggttctgttactgtcctcatgcggcaaaggaaaagagactaatttggccaggagcaaattgttaatgagtggcacaacacatcatgtctactgatagaaggtgatggggcaggagagacagaaggcaccaaaccccgattctgttgaaaggcaagctttgaccccctctctccgctctttttaaagttatttttaaataactgggagagttggggttgtgtaactatgtagggaggaatgaagacattctaaagtaagactgcccttccctttggctatctttctattgagacaatggacccccaggaactggaattcccccaggagtctcatgctgagaagaaaagggctggtgctgccagcctgtggggaagctttgtcacacagcgctgaacacttgcaggacagacctggaggcaggagcggagacaatgagtgatgtgtgcctggtagggagggccaccccttgaccaggacaccaggactgcacatttcttgtcctcaatttaaatctaagcctcatgccaggaattaggaggaggtggtcattaaacctcttacttgccacccccccccaagaatctctttttgctgcatctcactattgtctccgatttcctatcgaggctacatggctgagtccagcttgttggaaccagagcagctccaggaacactggggctgtagcttagtggtacagtgcaaaggggaaacaaaagaacacttctgcatatataaattatacatatatttgtgtagtacaaccgaaaaaggagaaatgggatattatcacactctgagggaatctgggaaagatgatgcaacgaacggcaaaatcctgagaggttagaaagttcagccaattgaaattttgttcacacaatgtttaacaatttaaaagaaatcagtagtaaaacacttaaatgtgggcaaacttctagtgtctcttgaaagtttactttctgatgactacaaattaggtaaattagtaaaataaagtcctggacattcagtttctagaggcactcaatgcattgataacaggcttcctcttgannnnnnnnnnnnnnnnnnnnnnnnnnnnnnnnnnnnnnnnnnnnnnnnnnnnnnnnnnnnnnnnnnnnnnnnnnnnnnnnnnnnnnnnnnnnnntgctcacttcatcactaatctatctgcataccaagtgctcactttagctcttcccctctcatttgggctcacagaacacttttctggtgactgaggctgagtacaagccctgtgccgaatgctgtgctagagctcgcttcacaagattgatcccatgtggtttctgcataaagaaaacattcagatcggcttgacaaatagcccccctcccacccattacacccctttgcctgtgcagtgtgatggtcagaaagccttccaggaaagggggatgcctgacctgagtcacaagtcttaactgggatcctgttagggagaagggtggatcttgctcaatactgtttacccaggttttggtattaaggaagtaaagacaggcaaacaaaacggagagacacactgaggactttgcatgcctggcacaacagcatggactttgctctgtagacagtgaactgactcaggattatttatttgtttgtttatttattggtaggatttccggtaaaccttgaactcagtattgtagccaaggctagccttgaactcctaatccttctatctcactttccaagtgttgggattacaggtaagtgctatcacatttggcttgaggatttttacacacacacacacacacacacacacacacacacacacacacatgcacgcacgcgcgcgcgcacacacaacacccagaaaaaaaggttcaaatttctggttctttcttctcaggtagattcaggtgcctagtccctagaaagctggatctcacaggcttgcctggcagaggactagttagtgtccctgcctgccttatttcctgccctgcactttactgtcctttgatattcaccccagcctcagggtagacatgtcatgtacatgtcttgtcctcttgaccatggtttgggaatagtgaatgtagcttttcagccagagatcttcataacaccttcattccaggggagattttcttctggtgctacatgatggatagccacatggatcacggctgcctactctggggacacaggggcgcaaaggcagagggtctaggccaacctgagccatacaactaagttctaggctggcaagaccccatctcaaaagcaagcaaacaaagactccctgcacaaagacaaaagaactcttaaggggggggggagagagagagagagagagagagagagagagagagagagagagagagagagagagagagaaaagccccaaaccatctagccttcagcatgaagagttggtgtgatctcccaaggaaaactgccaaagtcagagaagcttctgggggcggtcacaaaacagaaacctgtggctgaggaggaaaataagagacaggaagaggtggtggaagaacaggggtaaagtctgaggtcacagaggacagtggtgtaggagagtggtcacactgttaggaaggtctcagaggcagtgatggaatgcttccctgaacctgcaaactgtagcgtgtgatcagtgtgatcagcttcgctctaccagtgggagtagcaaaaaccaggttgtagtcccctgggaggggggacaaggagccagaagacactcactggaaagctttgatcaagggagaaagagtgtggctcaggaatgtggctttgactggggcctctcttcgtactaatctgctaagatttatctagtgctatgaacttgtgcagccacaggtaacttccccaccaagagcttttaaaccatgcaccaaaataaattctttctccattgaaactgctctgtccctgacaagaagcaatgcgtctacaatccttcccctattcttcacaaagaaggctttactcatctttcaaagtccaacagttactttgccttctctcccaaactgttgccaattcctccaggcacagcaacagcaatacagcttttgccaagctgggtagtaatttatctttccatcctactgcccattcaccattatttccaaacaaactctgacgcaacagacctgcctggggcaacggggaatgaagaaaccctagacacacgtaccgaaatgctggggctgggtgggccatgctctcagatggagatgcaccagtcatctggaaaactcagggtgtttctttcatatatgtgtgtgtgtgtgtgtgtgtgtgtgtgtgtgtgtgtgtgtgtgtgtgtatgcgaatttgctggtttgctaatctggataagaggtctatgaagaggcacattctcaggccgcagtcatttggaggaggaagctgtggttgatactttcagcacatcctatcaacatccatcctggaatcaagggaaggccttatcatttccatcgctttgaggcactgaagtccttagcttggtcactcttacttcacctgctccccccaaaactccgttttgtctttctggagtttatccaagagtgtgtcttccattgtgctatcttcctggtaaatgagtcaatgaaagccaaaggccttatcattcacatgtaacttagcataataaagatttttgaagaatttctcttaactctatttaccattgacaattaaaactgaaattgccttctgcagttagtttttctttaaaacttttcttcagtcctggtgacaagcccacagctgcaacggtaagctgtgacctccaattgtacaccctgaacccactcttctcagcctcccggttctgggctctgcttccctccaattttcttccttctcccagtgcagagcatgcagacctcccccatcaccacaaattatgcagtcaactttcccacatttggggaaatagcaagggtccacatatccagagtgccagggataagccttgccctggggaaatcgccttggtgattgtacagaactagcttttatgacaacttgacacacgctgggaatcattttggaagagggaacagtaattgagaaaatgtccctaccagaattggcctgtgtacaagctggtagttcattttcttaattgatgactgatgggggagggcccagttcaatgtgggtggtgactccaccccacctcttagtggcagggatgagtttctgggttatacaagaaagcaggctgagcaaaccagtaactagtgcccctctgtggcctctgggtcagttcctgcctccaggttctttcggggtttgagtttcttccctgacttcagttagtgatggctgtgatgtagaacaagctgaaataaaccttttcctctcacattgtttttggtagtggtatttatcacagcaatggaaacctaagacagtgatcatggcaaaattcaattttcaagatgaacctgaaagctagaggaaaatgttaggcatcgcctagcctgaattctttttactggacaagaaaacaaaactggagatcctagctctcctgtgctgagcctggcaaccaggtgggagactggatggttcagtaggccctcctctgtggtcaaacaaggctggaaaatattacaaggaaaattgaatagttcacaaattttattatagatatttataatcattttactatgttactgttattcaattcttactgtgcccaatttaaaattaaactttatcatgaatacgtacatacaagaagaagctgtctgcatagcacttggtgcttgctgtctgtggttttgagtgcccacgggcagcatttaaaatgtttcccttgtggactggaaaggagagtcaggagcaaccatgtgcttttttctatgtaaatcaaaccataagaattttaattcaaaaagcaaattaaatgtttttgagctaagcttctatctttgtaacttcagataaaaatagtagctaatgcctggatttgctgtgagctttaagttaatcaatagatgcaaactactacaaatagtacctgatcccaggacttacctggagtcctttactcttcatccagacattatattttgttccttcagggaggctttcacgtagcccaggctggcctcactatgactctgagggtgacgctggacttctggttctcttttgcctctatttcccaagtgttggaaattctccatagaagccatcatacttcctggtcctcttgattactgatgaagttctttctttccttaccttcttgattttaaggtttgaagtattttcattatcaaaacaacaacaaacaaaacaaaaataaaacatgcctgttcaaaactaaaaacagggagagctacctgggtatagaatttgcatgacataaacttaggatcttcacacacacacacacacacacacacacacacacacacacacacacacactcacacaaattcactttgagacagggtctcacgatgtagaccaggttggcctggaactcagatatctaccagcttcagtctcctgagtgctggaattaaacaccatgccaggttttgttttatatttcacttgtgtatgcacgtgtacacatggatgcaggagtctgtattggttatttttcttttgctgtgataagtcaccatgaccaaagcaacctataggagagtttattggaggattagtgtcagagggttaaatttcatgaccatcatggcacagagtatggcagcaggcaggtaggcatggagctaagcagtagttgagagcttagatcttgatcaagcatggcacacagagagagagagagctgttaatggaatggatttggaaacctaaccttgcccgtgtgacacagttcctgcaaccaggccacacctaatcctaccccaacagttctgccaacaaaga

SEQ ID NO: 129 - DNA, 1221 bp, Mus musculus
cagtggccccgaggcagcagtgcagagttccccagcgaggctaggcgagcagccggccggccggagcggagaagggagggtgggagcgagcgcagagccggcgccgcgcactgtgggggccaggagcagcccgcgcgccgagggagggactcgcacttgcaatatgactttggaggaattctcggctgcagagcagaagaccgaaaggatggacacggtgggcgatgccctggaggaagtgctcagcaaggctcggagtcagcgcaccattacggtcggcgtgtacgaggctgccaagctgctcaacacccccgataacgtggtactgtgcctgctggctgctgacgaagacgacgaccgggatgtggctctgcagatccatttcaccctcatccgtgcgttctgctgcgagaacgacatcaacatcctgcgggtcagcaacccgggtcggctagctgagctgctgctactggagaacgacgcgggcccggcggagagcgggggcgccgcgcagaccccggacctgcactgtgtgctggtgacgaacccacattcatcacaatggaaggatcctgccttaagtcaacttatttgtttttgccgggaaagtcgctacatggatcagtgggtgcccgtgattaatctcccggaacggtgatggcatccgaatggaaataactgaaccaaattgcactgaagttttgaaatacctttgtagttactcaagcagtcactccccacgctgatgcaaggattacagaaactgatgtcaaggggccgagttcaactgcacgagggctcagagatgactttgcagagggagagagaggtgagcctgaagaaggaagctgcgagaaaagagaaatccaaggcaaaagggacaaaaactacaaagcactgcaagaaagaaaactgctaatttaggatggccaggttactttcaaataagccaaatattgctttgttgaaactttaaatgtatagcaatagtttgggtattttttttcttttttttttttggtctttatgccctcaaataaaaggaaagtaaaagaggattaatcatattttcaagccacagtttaaatgtattttgatgagatgttaaattctcagaagttttattataaatcttactaagttattttatgatgtgaaaggttatttatgataaagtttttgaagcacattatctaaaataaactggtatggaataattgt

SEQ ID NO: 130 - protein, 162 aa, Mus musculus
MTLEEFSAAEQKTERMDTVGDALEEVLSKARSQRTITVGVYEAAKLLNTPDNVVLCLLAADEDDDRDVQIHFTLIRAFCCENDINILRVSNPGRLAELLLLENDAGPAESGGAAQTPDLHCVLVTNPHSSQWKDPALSQLICFCRESRYMDQWVPVINLPER

SEQ ID NO: 131 - DNA, 23282 bp, Homo sapiens
attttacagtgaacttgagaaactcattgttctgtattaaaaaacacgcacacgagaagtgtttgaataacatcaagcctgttccttagcatgcacagaaacacatgattcacattatcaaaactgcctaaaaaggctggttgtggtggctcacatctctaatcctagcactttgggaggctgaaatgggtggattacttgaggccaggaattcaagaccagcctggtcaacatggtgaaactgcatctctactaaaaatgcaaaaattagccaggcatggtggcgcaggcctgcagtctcagctactctggaggctgaggcacgagaatcacttgagcccgggaggcagaggttgcagtgaaccgaggttgcagtgagccgagttcatgccactgcactccagcctgggcgacagagcaagaccctatctcaaacaaacaaggaaacaaaaacaaaaacaaaaaacggcctaaagatctaaaatgcactgatgggggaacctcggttcatctatagttagaaagggaacatgtatattggatctacctgtggctgccatcaaaattcaggggaattttcacagcagtaaggacggaccaggaagtccagtcagtacttttgctgttagcaatgatgcctcaaatgttagagaaaatggaaataaatacaatattttacttagatgaaggaattaagaacaaagaaaattagaaaggacattggaaaatgggtgccatctaattaatattcatggtgtcctgctacatgcagtgtactctaagtgctgtgtgtattttgtctcatttgattttcatcataagtttaagagacagcgtttgtcagaaaagaggcaaaagagcttagatggcttgcccaagcctgattccagagtctgcattctgaacactacactctgatgccacgtgaaccacagctgttctagagaagcataatatgtggttaagaatgtgagatttgcagtcccacagatgtgcatttgcatcttgccctggccatttagctaggggtcttttgagttagtaactagtttaacctctccagtaggctacagcttacttagcaataaaatgaagataatagtatctatctcatagattgttgtgagggcttagtgacatcatgtaaataaaaatttaccatagtgctaagcatgataagcatttagcaaattagtattttttcttctttttatattttaaaaatttattttaatttttttagagatggaggtctcactgtgttgcccaggctggtcttggactcctggtttacatgatgtcatggtctcaagtgatcctccctcctcagccccctgagtagctgggattatagtcgcaagccaccatcccagcacaaattaatattcttagtaataaataaagcctaggggaggatcacttgagcctgggagttggaggctgcagtgaactgagattgcgccactgcactccagcctgggtgacagagggagaccctgcctaaaacaaacaaacaaaaacaaataaacaaactaaaataaggtctggtgggggtaggggaggaagtgtctttaaaggagctggcaggccttgaatctattatagtgttgaggacagcataacttctgaattttctaaacatctctggaagccaactcactgctgcacacagatttcatgagaaaatcttctaaagggatgcacataggttgaagttttgacatgtctgagttttggaaattatgctaagtgtcttttcattaaacttggagaagaatgaagggcaatgctcatatcataggtgacaacctgagaaaaagtaaattgcagagcactgtaaaaacccagtgtttaaggactcctcatagctagaaccaaataaattaggatttcccctgtggttagatttaaggcaaatacagcttcaggatcacagatggacttgttttgatagtttacataaaagatataaatccaaacttataaaatggagtagagggtccagttgctagggataattagggacacgccaaattaaccaaacttaattcagatggtcattaaacagtgaccccacctggttttcagtcgttttaccatctgttgtagctccttcttctcagatgggagaggtctcactagctcccaggtgtgacctgtttattaagacacagtgccaaatcatactccatagcatttggtaaccagacaataaattaaggttaataaggcaagttgtaacataacttcaactgacctatggaaacagattgaaatgtttgaaaattgatatcaaagcagaggaacatgaatgttttttaaattctttagacacattatctggtgattgaatttttaaggcccagaaaaataactttttttgtggtaaggtaaggtatttgaggtttctcagtgactgcgaaaaatatagagtaattatagaataataaaactattaagtaaaaaatgttagagctggaagggtcttagggaaccagacatttcccattgtgaccaatatgcatggctcagaggctatggggtgtattgcaggaggggagtgagggggagcctaaacttgccaatccctgcccttcacccccactgctatccggctactgcagccacaacacttccacttttatctatctatatgtggggattatgcctactgtggattttggggaaagggagttcttttcaaaattaaaaagagttcacaaatatttgtcaaatgaggaaactgaggaatggcgagggtaaacaacctgctaaagattctatcattcaagccacattcttggagggacatcacattagatttattattgttactatgtctgcaaagtagccacatagttcttaattttacagcatcatttcaaaacttccataaatacagaccagatatacaatataaacaaataagcttataaactggccttcttgtatttgatggcgatgctttcctaaaatagggaggacggcttgccaagagggagtctccagctgagaaagcaaaatctctgacacatttctgcttagtggacaatgatactaataagattgccccctcctatatcttaagggaatgagctggaacatatggcaaaaatccttacaggtcaacaacagaatgttaaacacaatccatcactttgccacaaactgatatggtccacaaagcacagaagtaaagtgttcataatggatagccagatagcagactattcactacattctttggttactgaaaatgaggctactttggacctttacatacaaagtctcatgggagccagaaagactactgtcacacaaacatggctgtggcccacatctaagaccagctatacagaaatgagcactccaaaagaccatgtcccagaccctcttcaaaacatcacagtcttacagagcttgatcctaaatgatcttgttttaatatttaatatcttccagactttgagactgacattttattgccaaagtacatgaggaccaaaccaaaataaaagaatgcatattattcaaagaacaaaaaaaacttataagctatttcaaagaataagttttactggcagaaatttccagttaatcaggattaaatgcttacaagcactaaagccagagagagaggtagaagttcaaatagtagtaaagaatgctcttattctcttttatttctttttctttcattctcagtctcctaaatactactttatttccttaatttcatctccaattgtgtttcttgtatgttgcttccgcaacataacccatctttgctttcaaatctcccacttcaaaactgaccttcataaaacctttcagagttgttttcctcatcattataatctctttgtgctacattgaaagaacaagacttgaagcttggcaattaagcaccttttaatctattgggtattatatgtgtatacagtacaggtcaaaatccttagcttacaaaatgggccagtttataacccctgaaaaaattataagaaaaacagttggacgggggtggaggaactatgagaataatatgaatgcagataagggtgcacaatcctctgtaactaaaacaatacaagtagttttctgatgtcttggaggactgaaaaaaaaatacaagccccaaaacagtatttgatcaagacatcttcctttctaatatacaaaaaagacaacaaattatataactcttatgttctaattcatcaattatatattaaaatctgtgtaccttattcattcaataatatctgatttaacaaatatttattggtggatcatgaggtcaggagatcgagaccatcctggctaacatggtgaaaccccatctctactaaaaatacaaaaaaaattagcaaggcatggtggcgggcacctgtagtcccagctactcgggaggctgaggcaggagaatggcgtgaacctgggaggtggcggatcttgcagtgagccgagatcacgccactggactccagcctgggcgacagagtgagactccatctcaaaaaaaaaaaaaaaccacaaaacaaatatttattaagagtccactctgtataaggcactgttctagtcacttagggaccaatcagtgaacaaaacaaaattctaccccatatttttggatagtggagtgggcaggaggagaatcagataacaaacaatatatataagtaaaatatatatgtttgaaggtgattgtgacatgatcttttaaaaaaacaggatttaagagattagtggtgccagggagtagaggtattgcaactcaactagagtgagcagggtatggctcattaggaagggggctggaaggcaatgagcaatgtggtatcaggagaaaaaacattccaagcttacagtcagcacaaaggccctgaggcaaaaggaagtccaatatggctagagagaaatgagcatggggggaacagtgtaagataagattgctgtagggatcagatttttataacagctttattgatataattcacattctgtacacaccctaaatattttattcaatgggttttactatattaactgatttgtacaattgtcaccattatcaatattaggacattttcatcatgggcacagattttatatggtattttaagccatagtaaggactaggggtttttctctgagtaaaaagaaaagccattgataactttgggttaaggaattgactgggatctgacttactatttacaggatcacttcggctgctggaggtgaagggaggaaaggcaaaagcagagggagaccagttgttacattttcctaggtgggagatgatgctggtggtagtggtgatgagaaatggttgaattattttacattttgaaatggagcctataggatttactgatggactggatgtggttgtgagaaaaaggaatcaagaatgacaccaaggtgtggggggctgaacagtgggaagaatggagttgccattgacctattgtaggcacagatttggccagacaatcaggagagcaacaattgtcattttaagtttaagatgcttactatatattgatgcagatatgatgaataagcgctgaggttcagaagagatgactgaccaggtttgaaatatatttgggagtcatcagcatataaataattaaggccatgggaccatatgaggtcaccaagagagtgagtacagagaagaggtataagcatgagctgttaagaagttaggaagaagaaaactttgcaatgaagttgatgggtgaatagaattgtttcttttatttcagagagagaaaactcacaaattggctgggcgcagtggctcacacctgtaatcccagcactttgcgaggccaaggtgggaggactgcttaagcccaggcgtttgagaccagcctgggcaacaaagcaagaccccgtttctttggaaaattttaaaattaggctggtgtgatggcatgtgcctatagtcccaggtactcaggaggctgaggtaggaagatcgcttgagcctgggagttcaagactgcagtgagctatgacagtgccactgcactctagtctggatgacagaggatgaccctgtctcaaaaaagaaaaaaaaaaaagcaaactcacaaatctgttcaaggtgcaaaaacaacctaccagtggccaatcaccaactcagaccacctacttccctcaccagtgattaggctacaaagcagagactctcagaacattcctcccatgatagaagccttctgatacgcaccgacagagaggtgaggggttagggggtgttgatcttgaagaatgttctagttagtctcttcatctgacttctccactggctgggccttgcttggctggtgaaatgtgagcagctggtggcagcacaaggtggccagcccaaagctcaaatcaacactatgattactaccatgattcttaatagctgaagagaatttccacaggataaggatttattgaacacacaaaaaagatggcattaagaatattatactagttttttgttgttgtttttgtttttgttttgagacggagtttcaatcttgtcacccaggctggagtgcaatggcaccatctcggctcactgcaacctccacctccagattcaagtgattctcctgcctcagcctcccgagtagctaagattacaggtgcctgccaccgcgcctggctaatttttgtatttttagtagagctggggtttcaccatgttagccaggctggtctcaaactccttagccaggctggtctcaagctcctgacctcaggtgatccacccgccttggcctcccaaagtgctgggattacaggtgtgagccaccacacctggccccaactaatttttgtatttttagtagaggtggggttttaccatgttggccaggctggttttgaactcctgacctcaggtgatccgacctcctcagcctctcaaagtgctgggattacaggcgtgagctactgcacctgaccaggaaccttatgatttttaacaagaaaaaataatacaatacaattctaggtaggtggaaaatacatccatcatagttgaactgatcttctcctttgatgtggacaatgatctaatactgaaataacaagcattatatttctttcagatgttaaagcattgattgttttttgaaagaaagaaagaataattctgcattatggaaccagtagtaggaatgtatgtaggataagcatgactaaaatatcaaaaagatctttaatatgcaaagcaagtagcagtgctaaaataattgaacaattcttgagtatatatttccatatgatttctaaatataatcatttggtatctttacaaacattactacaagagcattctactcctgtgtacttggcagttgtcagagttacctgtagtggtttttaaaatgacatcacatattggagttatcacactgattataaagaaatatatatatatatataatattgatataggaaaatttctctgatttaccattgactatcaatgtcctccaggactaataaacaattaatgataaatcaactatgtccattctaatgtgtaactacaatctaactgtgtagctaaatgcagtttttacttccagccatgaggcccaactttgaagataatcactgagaaaacattctaggtatactcagcaatcaggcaaaatgatgtaacgtatctgagtcagaaagtatgacaaatgaatatttttgcatactggaagcccaagcttatctcagagaaaatccccaaaatacttgggcaaataactttctgatgaagtcaaatatagcatgcagtataatttttgagtggaggactaagcctataataagaagtaaccatttgatatcacatttttactggatatagtcgacttgggtggggcactttaggactgtggttcatttgaattggtgtaaacaatacaccggttctactgtcctacagcctccattcagatgactgaagtcatgggactttcagcatagctagctgatgacagtgcatactattttgtcccaaaatccagttcaagcatggacataccaataagagcctaagctctttaaaggcaaaggaccaggaattgtacagttcttggtatagaagaagacaggcaaaagtgtttttgaactaacgttaaatgtgcaatatgttagaattcatgcaatgcacaggactgcaggattctgatatcttatttaactctcaaattctattcaactcaataaaccttgactgtgcttctactaaatgcaggtattgtactaggagctgaggacaccaaactgatgaagtccttgctgtcaagaaactcacatgattccctaattctttgtcagcttgctgtgatcacattttcttcccaagaacctctaagaaatgcctagtggatagaaccttggagttccacggaacatattaacaatcgccaaatgatgactcaggctagattgtgtaattcaggttttgtctgcaaaactgaaaatgcttcggtaacctacctaaatttcaatgttgaggaattctttaagaaagacatcaaatgttaagatttaaggcatagatatgagatacatagtcatgcttaggtgaattatgcactgaccatgaccatttctttactcaaatgttgtccatggctgacaacacagtgaaaaaatgagtgcaaaatgacaactcaaataaatgaaccagaaaacctatcacttttcttttccaccaaattaagatcaagagagctggagaatattttgtctagagtgataaaaacataagggtgcaaaacttccaggtacctttgcagaaattacttctgtgacctttggctgtacagcaaccttaataatgcaagcactgttttgaatgcaagcatgtgggagccattttcaccacttttgatgacttcagtaggtttaagaaatgtttttgcttttattgcataaaccataaaacaaaggaagggacttttgaactactcagtgagagtctatatattaaagtttgtttttcaaaaatgtgtaactaccatttgcagttttaaaggtctgctttccacctacaagttgccattatctcaaaggtgaaattttagcatatgactaaaaacttcctatagttacagcttcatgattcagcatctaacatcaataattcacagtgagatcataggaggctctctgtggaaggtaacgacatacatacgttaggaaaggaagcttagggcatatcgagagcattttgaatttagacttgtgggctgtgtgggtgtcagatggttgtctctcagctggtgggcgtccagaaggatccttgtttgggcaaggctctttgagaaaggagaatctgggttgccagggattcccacatgtggtcaccagctccccacgcagaccagctcacgatttcccagttacaccgggcaggtgggaaaccgttctgctttctgtggaaaagattctaacttggttccctgccatccctgaatacaaacgggttggtttttcttttttcagcttccaacccttgcagctttccaaaaataaatcaaaccagccatcagggcaccgaaataatactactgctaataagcagcttcgcctagacttagataaacaacacttctgaggtaaactttgccccggaggtctggagacacttttttaatgtaacctgcttactaataattactagacttcagtgcattaaccctggaaatagattttaatagccaccccttaaaacaaaagacatgaaaagataataagaaaaaagtgccgcaactattatagaaaaacacttggcagcctgcttcagcccaagctgaggccacctctagcctctgctaaagccccccactcccaatggtccccgccaaccggataagagtgcgcgcgggacccgccttcccctctcggcaccgcccccgcccccgccccctcggctcgcctcccgcgtggctcctcccttttccgctcctctcaacctgactccaggagctggggtcaaattgctggagcaggctgatttgcatagcccaatggccaagctgcatgcaaatgaggcggaaggtggttggctgagggttggcaggataaccccggagagcggggccctttgtcctccagtggctggtaggcagtggctgggaggcagcggcccaattagtgtcgtgcggcccgtggcgaggcgaggtccggggagcgagcgagcaagcaaggcgggaggggtggccggagctgcggcggctggcacaggaggaggagcccgggcgggcgaggggcggccggagagcgccagggcctgagctgccggagcggcgcctgtgagtgagtgcagaaagcaggcgcccgcgcgctagccgtggcaggagcagcccgcacgccgcgctctctccctgggcgacctgcagtttgcaatatgactttggaggaattctcggctggagagcagaagaccgaaaggtgagtcggcctgcggactcttccggcccgaacttctcttacctaccccgcgctccccggtgcagccgggctgtggaaggcttgcaggggaggaagctaaaaagtttgcacagggcaactcccgcccttgctccctcgggactctccgtggagctcccacggactgaaagagcgtgccccccaacccgaacgagccccgccggggcctttgcaaagggcagcagtggccgtcgctgcccgtgcggctcccgtggctggcagcctgtggcaggggcactctcgggacttctcacgggacgcccggtccttgggcgtgcaggggtcatggggggtgacggggccgcgggagcgccgggttttcgtagagcccaggtgcgcggtggtgcttgcattcgagagggaggggcgtggtaccggacgaggggggcggcgatggccccgagggcaccggggctgacgggacccctcgcccttgcccgcgtgtaggatggataaggtgggggatgccctggaggaagtgctcagcaaagccctgagtcagcgcacgatcactgtcggggtgtacgaagcggccaagctgctcaacgtgtaagtggggcccttgcgcgtcccccatggcaccccttcccgccccagcccgggaggtcgccttggctgggcgcccctcgcccggccgcgccacttcctgtcgcttttctgcctgtctcggaagggagggggcgagcgggccgggcggcgacccccagggacccgggcagtggttgagggcgcccgcgcttctgcgctcactggccccgcccgctgcccccagcgaccccgataacgtggtgttgtgcctgctggcggcggacgaggacgacgacagagatgtggctctgcagatccacttcaccctgatccaggcgttttgctgcgagaacgacatcaacatcctgcgcgtcagcaacccgggccggctggcggagctcctgctcttggagaccgacgctggccccgcggcgagcgagggcgccgagcagcccccggacctgcactgcgtgctggtgacggtaagggactgggggactgcagcctgcagggtagagccccggaaggacgggagtcagggctgggttgcctgattgtggatctgtggtaggtgagggtcaggagggtggctgcctttgcccgactagagtgtggctggactttcagccgagatgtgctagtttcatcatcaggattttctgtggtacagaacatgtctaagcatgctggggactgccagcagcggaagagatccctgtgagtcagcagtcagcccagctactccctacctacatctgcactgcctcccgtgactaattcctttagcagggcagattagataaagccaaatgaattcctggctcacccctcattaaggagtcagcttcattctctgccagtcagagctaaaaatagaaattgtgtaggagacaaaccttgttaattccctagaaatacattaagaggatagagtggaattttttttctctgcaatcttgcatttttttaatggctctttttttttttcctgataaaaacctttggtaggtagggaagttatgttttcaggggtaaatgtgctacttttgtcttctaaattttgctcttttttgactggtctagtcaagtgacagcccgattattttgctactccttaaaagtactattctgtctcttggagtatggttgatggcaattccagttaactgctgtgcagctctcatctcattgtgcacacagcatggaaatctttctcaaaactgtttcactcaggtcagggtaacaagtttggtagagcaaaccggtgaatgatactctcatgcaaaactgaacagatatgcaaacatatgtatgtggttcagcttgggttgcatgggttcagactttgcaatgtgtagtttaataggtaattacccttaacgcttttgcagggaacccaactaccttgaagaaactttaatttttttgtgcttctaatttgtctccatgtcacatagccaaaatatagaatgttcaagtgttttctcctcaaaagtataattactagaatatactggtttttaaaataagtttatttttataaatttgtttccagaatccacattcatctcaatggaaggatcctgccttaagtcaacttatttgtttttgccgggaaagtcgctacatggatcaatgggttccagtgattaatctccctgaacggtgatggcatctgaatgaaaataactgaaccaaattgcactgaagtttttgaaatacctttgtagttactcaagcagttactccctacactgatgcaaggattacagaaactgatgccaaggggctgagtgagttcaactacatgttctgggggcccggagatagatgactttgcagatggaaagaggtgaaaatgaagaaggaagctgtgttgaaacagaaaaataagtcaaaaggaacaaaaattacaaagaaccatgcaggaaggaaaactatgtattaatttagaatggttgagttacattaaaataaaccaaatatgttaaagtttaagtgtgcagccatagtttgggtatttttggtttatatgccctcaagtaaaagaaaagccgaaagggttaatcatatttgaaaaccatattttattgtattttgatgagatattaaattctcaaagttttattataaattctactaagttattttatgacatgaaaagttatttatgctataaattttttgaaacacaatacctacaataaactggtatgaataattgcatcatttcttattgtgtgctcttgtttcttttaacttgtactttattaaacacattttactgacgctttgctgtataccaggtctataatcagaaagcaggtgatttaaaggagttggagttgtcaggaaaaagggatggttagagattcagcttgcaaaatttgaataattaaagataaatgatattagcgccgtaataagattatacacaaaatgttgaggaggcagagaggacagagtgactaaagttacctaccagtttttactgaagagagatcattttatgttggtcttagtgagttttatttccctagttacagagggcaaagggatattgctagcagctgcattagtttgtgcaaaggtgtggaggcctgaaagaccacaaccaggtcagtaaaaacagagtgattgtgtgtgtgcctctggtgtagaaagataagggagcagcggggctgaaaaggaaggtggggattaggcccaggctgtgaaggcattctgtgttacccttatgcatttgggcttccttctgtaaacttcaggcagatagcggagcccctgaaggaagtggcatgatcagtgttctaggaaagtaacaccggggtctgtgaaagatgattattgggatgagcagctgtaggtgacaaggccagttaggaagtgactaagaatccaaggctgtgcattttgcagaaccatttttacagagcaaacagggaagtggccaggcaaggttttttgctgcccctagtctcttcctaaagctttgtgctttccagctgaacatttctatggttctgaggggtctgcttaaattctatcagatggaatagatggcagagaagaaaagcaaaagaaaagtcttcagtagaacaatcatttttagttagaacagtcacttgataattaactccaacaatcttgtaggcatagaccaaagaaagcaaaaatgcttatggaggcaaggcctagccttgcttttgtccacaggaattttcttgtcctatttctcaaaccgtcccccttatggctcccctgccatctgtctttcatcctagtcatgactacatacaatcagaagaaagggtagggaaaacccactaatagcaacaaaaagctccaagtttctgcatatattatgaatacatagctccatgagcccttcaccttgcaaatgactctcttttcccacatctgctagaaatgtggggttttaggccttgtttaggcttcttgtatcttttcacaagtgactttttctacatctgctagaaatgtgggtttttaggcttatttaggcttcttgtatctttttaaaatccagtgcccactccaaaacataactggtatttaatatttgtttcttacattaccaaaagattgagagcagtgagttttaaatagcaaggtgttttgccttcccattgaagtaaggtttttttcagccctttttcacaacgatttggtaagaaccctcttgcagagatgaatgaattaaagtggagacacacagtggataaagctggtttgcttagtggaacgagcacagtagcagctagccttgattagtccttcttcatcctgttttactcatgtaaaatggagataagattacctgtcttgcagacttgtggcctctcctacaactctgcaacctccctcaaggcaggtaatgtctggttcattattgtagcccagtagtggacacaagtgccagcaagcagtaggtgctgaattaatatttattgaataaatgaatgattagaaataatgaatacaaactacctggcacatgataggtgctcaatggagtgtggctgtttctaaaacccaggtgatagcaataggaaaacttaaggcatcagagagatctgtgttatgacatgtacatctatataactatgtttttcaaaaagaatttttgatctttattctaaattcataatgcttagagatatgtaatagtacttatacattcttcagattgttttgaggaaaatctcaacaattactgtaatgccatttggtttcttcaaaaattttaaactcttgtttttctttcctgattgagcataacataaagttaacacagcattgaaaaacccaatcatgaaacagttaattttaaacaaatataaaattacctggatggcttctatctctaattgatgcaaatattctttagtcgttgccttaaaaaccattaaatgtacttattgcaagctacgttacaacaagaacagaaatcccctcatctacctaaggtgtattgaatgttgaaaagtggaaaatacctaatttttccactggcaacttcacctcagtgtcataaatagcattgcttcctcctttccacacttaacctaggatcttggtaagttaaacttttataatgaaaggacccatgaaagtagctaatctcctataatacataccttagttcccaaataaagaaaaaagggtcattttttaggaaagaattatttgtatactgtcaattgaaatatttccaaagcatgttttgagatgccttactggagcccttgtgaaataattgcttaattttcatttatataggtagaattttattctttgatatgtggtaaaagactgaaatttgggagataagttctcttcaaatgaacaaaactcagtggcatgatttgacaccaagtaagtatccctcaaagaagtgaatactttttttctttttaacaatactttggtaaacataagaacctctgtgaaaaggtcgtattcatgaaaaccaccaagaaatattaagtgagtgcttactgtggacaagggactatgctggctatattgaagtctaccaaaaaaaaaaaaaaaaaaaatcagacacacactctggcctcaaggacttcgtatcactacataaatacaaaacagaaaattaccagcaacgtaagaaaggcccagagagctgttctggaagttcaaaggatagaaatctccagaaggcatataggaatggaatggagaaaaaggttgtaaactctttgttcataagctagcatcgtattttgcaaacagcacaaaaatgtgatcgattgattgaatattgaatataattttgctaggtgctatgaagaatacaaagatgtagcctattagagcatttctccttaagttgacaatctataaggaaatcattaagcacattaaaaaaagataagcttgttcatttcaatcatgctgcttattgaatgcctatcattttcctggcactatgttaggtcccaaggccacaaaggtgaaaaagcagccacctttaaggatatgtacaatttagtagggatacctgatacctgtaatactaggtgacaagtgataatgaggtatattcaagacctaagtgttcctggggccagggaatgtttgccaggttcagtgagacctgaaagatgaagagatctgccaggtgaatgtgaagggcatttactccaggaggaggaactatagctcaggaaggtacacactgaaggcatgtttggagctagcttttgggtgacagcaacactcatacaagatttactacatcctgagcactgatctaagccttttatcaacaggaactcattagcactctcaacaaccctgtgggagtaggtactattattagccccattttgaaggtgaaaatactgacacacagagatcttaagttgcccagaatcatactgtaagtggcaagaccaggatgcaaacatgtcctccagtgatgggtgatggagtgggaaagatggtagaaaccagaaaatgattttccggcaggccaagcttcttttctactagatgatagaaagccattaaaattaattggtaaaactaagagaagagacagatgctgtcaccaccaagagacagacaatgaaaagatgatgctatagcttacaaagtcctaatgtgggggtggaaactggtagccaagagaaatttggatcacacaatatataacaatttttaaagatcagttgtaaacatttaaaaatgggaaaatttcttagcaaaatccagacttttattgtttcttgaaaatgtgctatactggcaaccgtaggtccatactgcgtggtggcaattcgctggagccaataggaggcccctcccttttggacttggatttccagtttgccacagacctcacccctccctgttataactctagtttgctggactcatgtaagcttccctccctcatcctattaggcatctgagatccacccttcgcccccaccccaccgactcagactggggcttagaatcttcctgtgtaaaatgaagtgtttacactatcagaatttctcaaactgtttggatgaaataaggccctgaggtgcttgttaaaaatataactttcaagagccattcccagaagctttagattaagtggggctggaataaggctcagaatttattttttcctgattcaagccccagaaaaagaaaaaattatatatatatgtatatgtttttaacaagtaattcaggtaattcttataagggaagtttgagaaataatgaatgctctctcggagctctctttacaaatctcagggattaggtagggagaagcttctacatggtcagtttccagtttcccttgatgttagcccaccaaaagggatgcatatttctctgcaaaaattgcagggattcccatgaagaggtgtaccagaaccatttgctacctggagacagataattttcaagttaactcaggtgatcactacacaaaaggtgggagagtctgcaaacagaatggttcttacctctccttgaaccgacagatcaacacacctgttatgtgctagacatggtgctaggcactttgaagacgagggagaagctgacaagcatgattaaaatctgttattgttatactatgagtactgctcagtgtcaggcacacagtaggtgctgagaagtaagtggggcttccagttttcattttttcttttttctttgtttgtttgtttgtttgttttttgagaccgagtctcactgtgttgcccaggctggagtgcagtggcacaattttggctcactgcaacctctgcctcccaggttcaagcaattctcctgcctcagcctcccgagtagctgagattacaggtgcatgccaccacacccggctaatgttttatattttggtagagacagggtttcatcatgttggccaggctggtcttgaactcctgacctggtgatcctcctgcctcggcctcccaaagtgctgggattacaggcgtgagccaccgtggctggccacttccatttttcttacaaccactagtactttctgcctttcatggattttcacattcattaattcatttgattctctgctaaagcaactgaggctcagagcaatcaagagacacctccaaggtcccatgacaaggaagtggaagaatcagaattttacggtgaattcagtcctcttgatgctaggtcagtctctcaaagaggccaaccagacagcagagattagactggggaaggatgaaactaattgaatcgaatcttttacttatccaataagtggggcagagccttgggaaatctaaaggagacaaaaaacactcaagggagaattctaagaattgtcttctttcatcttagaactgggaaagttctaagcatcattgaaaagttgatctttgtgtccctgcatgcttttatgctaatatcttttctagaattgtctgagaaagaatttatacagaaaagcagcaaactttcttagtatcatcacttaacacatgattatatcaccatattgtaatcatcttaccatcattgaaataagcactcagcaagaaatgggtcatctggaggtcttctgatttgattttgcttctttatataactgtgaaggacagggctagcaaaagataagaacaagagtacagcagttaagacagtggccgccactccaggccattgtcttaataccagcctgtaataccagcactttgggaggcctagctgggaggcttgtttgaggctaggagtttgagatcagcttgggcaacatagcaagaccctatttttgtaagaaagaaaagaataacaaaaatgaagaaaaaagacattgggttttagaggcagaaagacttgagcttgaatcctggatcctagctggaacttgggaaagttagtgtaactctcgaagcctcagttatttctcctgtaaaactggggaaataaacaaggcttatatcatcgggttatggtgaaaaggaaaggaaacaatgcatagaaagaacctagctcagttcctagaagcagtcaatatatgtaagctaataataattgcatcttccatgaactggtgattttctatgcctgtttatattccattaatatttaattgttctgtttgcaaattagttatataagtaaaaaaaaaaaaccacccagtaaactacatagcccaacataactgaattcagcaagacaccatccaattaaattatgttaattttcactaatctagtttcccctctccatttccattaacttaatttagttctttatctgtcatttaggctatcagaacagtttctgttcaaaatcaaggttgtgagaacataagtaccgtgtatcaagtactgtgctagagcttgctccataaagatgattgtgacacagttgctacatgcagtttgctataggaactataggaagctgacagacacagataattttcaagccagagtagtgtcacggcaagcatgggtatgcacaatgtgtgtgtgtgtgtctgtgtgtgtgtgtgtgtgtgtgtgtgtgtgtgtgtgtgtgtagggggtggtcaggaaaccttccaggagaaggtgatgcttgatgtgactcttgaagagcatttaggagctcattggggtgaggggtgtggcatgtgtggggctctgtggtgtttgttaggggattaagtatttaaggaagggagtggagaaaggcaggctgaggaggtagacagaaacagatcacagaggatgtaaatagggggtggggttggaggagagtgataagggtttggaatggaaaggagttgaagaactaataaaagaatagtgaataccaccctccactccctactccccacagaaattagaaacacgacctccagtttttcttcagtagtttattttccttgttcattctaattatcttcatgtcaagaccatgcttaaaaatctcttaccggctgggcacggtggttcatgcctgtaatcccagcactttgggaggccgaggcgggcggatcacgaggtcaggagatcgagaccatcccggctaacacggtgaaaccccgtctctactaaaaatacaaaaaattagcccggtgtggtggcgggcgcctgtagtcccagctactcgggaggctgaggcaggagaatggcgtgaacccgggaggcggagcttgcagtgagccgagatcccgctactgcactccagcctgggcgacagagtgagactccgtctcaaaaaaaaaaaaaaaaaatctctgaacaactacccttccccccatataattcagtacaaactcttggcctttgattatttgacccaactttccttcccagccttgtccacattctcattcccatacttccgttgcaaagatctctgttgctctaacactccaggcttccttagatcttggggcttttgcatacactatttttcactgctgagaatatcctttccctattctttaccaacaaactcctacttgttcttcaaagtccaactaatatattatctcttctatgaaatcttttctgactcattcaggcagaacaatttcttatgatagcatttaccatattgcatagcaatttatctgtttatttcctactgcccctgcacctgttacccccactcccactatccttgtgttttctgggtttatcctaggacatacctaccacagtgctagtaggagctcaacaaataaataaatttctctttgttctgtttctataaaccaaacgcactgtcattcatatttaatgtttgagtgggctatttttctttttgtagttatgttttatgaactcataaggtgctactgacactttaagtttgttaaagaactttgctccttaattctattagtggtaggctgtcaatattcaaaatgcttttctataattcatttttccttaaaattctttatagacctgttgatgagccagtagctgaagtatcaggaggtgattctttaaatatcttttaaatacctataattatacacaacaaacccacgtgccctcctctggctccatacgctagactttggttcttctcctgattttcaattcaaggaggaaaatgtacaatgacttggggtggagatggcaagagggttgatctcctctcagatttacagatttatatacaatttaaagctagaggaaatgttaaaaattacctagcctaaatcttttttttaaaagtgaatggggaagtagaatcagagatcataagtgtcctaaggttgcacagtaaatgagtagtaatcagtccagaacatgcatttcctgattccaagatacgtattctttctcttacgtcacactggctaccctgaaaaatggttttctgaaagcatatccaatatacttttggatctctccaggcttctatttcctcatatgtaaagtaggaataataggagtagctgtttcctggatttgttgtgagaattaaatgaattaacagatgcaggccaggtgcggtggctcatgcctgtaatcccagcactttgggagaccaaggcgggtggatcacctgaggtcaggaattcgagaccagcctggccaacatggtgaaaccctgtctctacaaaaaatacaaaaattagctgggcatggtggtgcatgcctgtaatcctagctacttggggggctgagggagaagaatctcttgaacctaggatgcggaggttgcagtgagcccagatcttaccactgcactccaggctgggcaacagagcaagactctgtctcaaaacaaaaacaaaaacaaaaaacaaccaccacacccccaccaaaaaaaaaataaacagatgcaaaatgctaagaacagtacctagtcatagtaaatgcctgaaatatagcactgtttattcttaaggcccagggtattacactcatgattagtaaaggacttacttgtttaccttaccttttacttaatctaacaattaccaaagttactgtttgtttgttttcccttattcaaaccatactacaaatattaagatagtccatgggctgtacaatctgcctgggtgtatgttcttaggacccacccttttatgttgttggatctagcacaattttcttaacttctctgagcctcagtttcctcatctgtaagatggggttaaatcacatctactttcctttaaagagttgttttgaggcttcaatgggagaacacatgcacaatgcccagcctagtgtctggagttcagtgttcctcattgccttgcacagatgtctacaaatgttgacagatgttgcatggccagtgttgaaacgtacatacctcaccaaggtcggatctaaaatgtttatttagaacaaagcacttctagtgcattggccatgggaaaatttttcaaggttaaaagtagaaatgtgaacctgtctgctttacatgggtgattttttttttttcttgagacagagtctcactccgtcgccaggctggagtgcagtggtgcaatctcggctcactgcaagccccgcctccaggttcgcgccattctcctgcctcaccctcccgagtagctgggactacaggtgcccgccaccacgcccggctaattttctgtattttttaatagagatggggtttcaccgtgttagccaggatggtcttgatctgctgacctcgtgatccgctcacctcggcctcccagagtgctgggattacaggcatgagccaccgtgcccggcctacatgggtga

SEQ ID NO: 132 - DNA, 1398 bp, Homo sapiens
cctgactccaggagctggggtcaaattgctggagcaggctgatttgcatagcccaatggccaagctgcatgcaaatgaggcggaaggtggttggctgagggttggcaggataaccccggagagcggggccctttgtcctccagtggctggtaggcagtggctgggaggcagcggcccaattagtgtcgtgcggcccgtggcgaggcgaggtccggggagcgagcgagcaagcaaggcgggaggggtggccggagctgcggcggctggcacaggaggaggagcccgggcgggcgaggggcggccggagagcgccagggcctgagctgccggagcggcgcctgtgagtgagtgcagaaagcaggcgcccgcgcgctagccgtggcaggagcagcccgcacgccgcgctctctccctgggcgacctgcagtttgcaatatgactttggaggaattctcggctggagagcagaagaccgaaagcgaccccgataacgtggtgttgtgcctgctggcggcggacgaggacgacgacagagatgtggctctgcagatccacttcaccctgatccaggcgttttgctgcgagaacgacatcaacatcctgcgcgtcagcaacccgggccggctggcggagctcctgctcttggagaccgacgctggccccgcggcgagcgagggcgccgagcagcccccggacctgcactgcgtgctggtgacgaatccacattcatctcaatggaaggatcctgccttaagtcaacttatttgtttttgccgggaaagtcgctacatggatcaatgggttccagtgattaatctccctgaacggtgatggcatctgaatgaaaataactgaaccaaattgcactgaagtttttgaaatacctttgtagttactcaagcagttactccctacactgatgcaaggattacagaaactgatgccaaggggctgagtgagttcaactacatgttctgggggcccggagatagatgactttgcagatggaaagaggtgaaaatgaagaaggaagctgtgttgaaacagaaaaataagtcaaaaggaacaaaaattacaaagaaccatgcaggaaggaaaactatgtattaatttagaatggttgagttacattaaaataaaccaaatatgttaaagtttaagtgtgcagccatagtttgggtatttttggtttatatgccctcaagtaaaagaaaagccgaaagggttaatcatatttgaaaaccatattttattgtattttgatgagatattaaattctcaaagttttattataaattctactaagttattttatgacatgaaaagttatttatgctataaattttttgaaacacaatacctacaataaactggtatgaataattgcatcatttctta

SEQ ID NO: 133 - protein, 129 aa, Homo sapiens
MTLEEFSAGEQKTESDPDNVVLCLLAADEDDDRDVQIHFTLIQAFCCENDINILRVSNPGRLAELLLLETDAGPAASEGAEQPPDLHCVLVTNPHSSQWKDPALSQLICFCRESRYMDQWVPVINLPER

SEQ ID NO: 134 - DNA, 1500 bp, Homo sapiens
cctgactccaggagctggggtcaaattgctggagcaggctgatttgcatagcccaatggccaagctgcatgcaaatgaggcggaaggtggttggctgagggttggcaggataaccccggagagcggggccctttgtcctccagtggctggtaggcagtggctgggaggcagcggcccaattagtgtcgtgcggcccgtggcgaggcgaggtccggggagcgagcgagcaagcaaggcgggaggggtggccggagctgcggcggctggcacaggaggaggagcccgggcgggcgaggggcggccggagagcgccagggcctgagctgccggagcggcgcctgtgagtgagtgcagaaagcaggcgcccgcgcgctagccgtggcaggagcagcccgcacgccgcgctctctccctgggcgacctgcagtttgcaatatgactttggaggaattctcggctggagagcagaagaccgaaaggatggataaggtgggggatgccctggaggaagtgctcagcaaagccctgagtcagcgcacgatcactgtcggggtgtacgaagcggccaagctgctcaacgtcgaccccgataacgtggtgttgtgcctgctggcggcggacgaggacgacgacagagatgtggctctgcagatccacttcaccctgatccaggcgttttgctgcgagaacgacatcaacatcctgcgcgtcagcaacccgggccggctggcggagctcctgctcttggagaccgacgctggccccgcggcgagcgagggcgccgagcagcccccggacctgcactgcgtgctggtgacgaatccacattcatctcaatggaaggatcctgccttaagtcaacttatttgtttttgccgggaaagtcgctacatggatcaatgggttccagtgattaatctccctgaacggtgatggcatctgaatgaaaataactgaaccaaattgcactgaagtttttgaaatacctttgtagttactcaagcagttactccctacactgatgcaaggattacagaaactgatgccaaggggctgagtgagttcaactacatgttctgggggcccggagatagatgactttgcagatggaaagaggtgaaaatgaagaaggaagctgtgttgaaacagaaaaataagtcaaaaggaacaaaaattacaaagaaccatgcaggaaggaaaactatgtattaatttagaatggttgagttacattaaaataaaccaaatatgttaaagtttaagtgtgcagccatagtttgggtatttttggtttatatgccctcaagtaaaagaaaagccgaaagggttaatcatatttgaaaaccatattttattgtattttgatgagatattaaattctcaaagttttattataaattctactaagttattttatgacatgaaaagttatttatgctataaattttttgaaacacaatacctacaataaactggtatgaataattgcatcatttctta

SEQ ID NO: 135 - protein, 163 aa, Homo sapiens
MTLEEFSAGEQKTERMDKVGDALEEVLSKALSQRTITVGVYEAAKLLNVDPDNVVLCLLAADEDDDRDVQIHFTLIQAFCCENDINILRVSNPGRLAELLLLETDAGPAASEGAEQPPDLHCVLVTNPHSSQWKDPALSQLICFCRESRYMDQWVPVINLPER

SEQ ID NO: 136 - DNA, 53739 bp, Mus musculus
  misc_feature (1)...(53739): n = A,T,C or G
cgatgtctgcacaaggctgtcactcaggtggcagtggctgagacgtggccgggcagctctgctgctgcggcgcgaagtcgagaggcggcggggtccgtggcgcgcgctcgcagtgctccgaggctccgagcggcgagacgggcgggcgccgacggcagggtctccatgcccgcgcgtggggcgggccgctgatggagcgcgccacccggcccgggccgcgcgcgctgctgctgcttctgttcctgctgctgggctgcgcggcggggatctcggcggtcgcgcccgcccgcagtttgcttgctcccgcgtcggagacagtgtttggcttaggggcagcggccgccccgacttcggccgcgcgggtgcctgcggtggcaacggccgaagtgaccgtggaggacgccgaggcattgccggctgccgctggcgaaccggagtcacgcgcgacggagcccgatgacgacgtggaactgcggcctcgcggcaggtgagaggttgggaactagggtcggggcacctctcgcagggatgcgagtgactgcggacaaagcagagagccgcgacaccttcctgtcccactctgagcgcctgcctggtcctggctgtgggagggcaacagcatctttaaaggaggatgagggatgcctggagaatgcaacacccggcttagggaagaaagtcacttccccgctttcattgttttcgggctttaaccatatgcactttacactcccattcccaaatacttgactcgttctgtcctgattctgttgcgacaggtaaaacgactttcaaaagagatgcctacatttatccttcaaatacaagtctgttgtggctcctggtcgagggttttgattttctgtttctctaattgagatatgcgggaacacctgcatcagaattaccagggggatgctggttaaatggacagttttctaggctccgccccggttttactaaaccagaccttttctgggtaagaacaagcactctcaagagctccgaacacacttagaggttaaagtttaaggagtgtgcttgggttcttttatcctagcagctttttgatatttaaagggggttagcatagtttatttcagttggatttcttagccttataaacatacaaattcaagagacaagttttaaagcaattttcaaagtctgcacagaatgtaaaatactttaataaagtatttttcagatagcatgtgtggagaaagtggcactatttaatagaaagaatgctaaaagagcattaggtaaattaagagctgcatctaaattagaacatatctaagtttgtaacatagtagttatagattataaaaagtatcagaaccttgatctaggtacccagtgattaccagaaataaacagggcaagccctaaaattctccatacaccatttgaatagttatatttaagaatgtttaagtaataaagaatacaatttcatctatttgcgaatgtatgaactctcctagatgagtgaaacagctgtgaagagtaaattacacgaagtagagagaactattctgttttccttagaacacacacctgcagcagcagggactttctaaagctgagcagaacccctggggttatggaggtagagcaggaagcctctgctcttggaaggaatacgcagtcaatccagcaatcgggatgaagcagaaggtcctaactgtagggcggttcaaatgaacagtagaaagcagtacaaaggaactgtcatgggtgatgcacagtttgctggtgtatgctgtgtaaggcaagggatgaggtaggtttatagataagaaatggctgtgacagaatgatttggttcttaaaaatgggtagaattctgatagatggtggacttaagacagcaagaagaatgggggttggaaattatattgagaccattttggggagcgtgtgtgcgtgtgtgcgtgtgtgtgtgtgtgtgtgtgtgtgtgtattcttcgcctaacagcattatcacttggaaccacgttagacctccagaatcaagtacctcccaacctactaagcacctgccttgtaatagatcactgtgtgatttatatacacattagtctgagaaatcttaatcttgaatggtcaggtctatttctctagcaacaaggtttactgaaacaaggtaaagatactagtattatattccattacttgggactaatatgagagatagttgaagcaaaatcttagttcctagcaagtgagttggttcttcatctcttgatacagctgtataaagatcaagagttagtggccagaaaatgatagcaaacaggaacatcaagaggcttagagaatctgggaagaaaaggtaagggatgttggtcctgatgcctcagagatttaggtcatccagattgatgcttgccaggaagatggacatgaaagacttcagctaaagggaaggcagacagatagctacagttataaagcagagaaggtgcccacaagaaagccccaggaaatcttatagacagcagcaacatagctgactaggttggagtataggactgagtctggaaaattttggtgatgagcacacttaatagtttcattaaaccaaggaagtaagttgcaaagggtaagaattactctctttctgaatcactcccgactttccttcctggtagtttaccaggagggagcctgtatggacaggttggaaatgaaaggaaggaaggataagatacagagaagccatgggaggtaggaggcttgctgtgagatctgagttacaaagggcagcaaaggattgcttgtcaatcaggaggaccactttcctcctgctcagacacaagtgaaaatagaggaggtgtgttgggaggagagagtgtgtggtccctgttaacagtagtgtggagtctgcagagtgtgaatgagtgagaagtcatgggcaagcgggtccacaggagctaagtagtcagcgttctacctaagtgctcttcacaagccaaaaatctgaaaatattagttccataataatagaacaatatcctgtttgtttcaaggggagggctagaggggcagagctgagttaaccaagcgttgattacaaacagctgtgaagaactctgaagcttgcagaagggggtgaggggtggctgcttttttgtgccttgtcttttgatgattagccttagcaagatgggacctactgagactcagttctctcttgtgattggctttcatccaccttacctggtgcctgaatgttgactctgtctcaggcatgtgactggctggataaacaccctttttccaaaaaatgtaaacttgtttttccagtagcagtctcagaaagttttcttctaaactttagactggtaaatggtatttccccaccccaccccccactgagaaaattaggacaaacgcctcaatcacacacttaactatggatactgttgtgttaccagctcgacttccaacatgtgttaataaattgccaagtgttactcagggttcctgcagtaggttaggcctgcaattccttacttgcttcctgcagtgagtttggcctacaaaatgttatttgcttcctgaagtgggttgggcccagggaagtgttacttggggtttctgcagtggatcatttatcttcacactgaagacatgttgaaggtacaaagaactaatttagtcttgcttgtcatactcattgcaaagtgtatttcctttttccttgcttggtctctatacttcctaacaaaagaattactaaagttgatatttcctggcgtcttgatacactgtgcacctgctgtcagaagtttttggcttgaaataacattaaacattttttgcaaatataagatgatttaattcctctttatttctctttcatttgtctttccccagactgagctgataggaaccaaaggtgcagaaagctggtttcctcagatgttcgaattcataatattttgtttgttgtcttaaaccccactgggcctttaaatgatatagcatctccaaatactgtgttgaaagagagcattgttacccatgtaggcctgtcagggttcactcttccaccctggaccctggaggttaaccaaaaacttgatttaaagaagaacttataagtaactttgcaaacaagttactaccaaactaaacttacctggggccagtaaatggactgtccttcctctctgtagtttccttcgacttgactgatgcctagactgaatatctgtgacagccacgaggctgtccttgatctgacctcagctctgtgtgttcattttaccaaagggacctgtctgtcagttgctgtgagcagccattagaacatggctcctcaatacctggcggcatctccacctgttttttttcttttcctttcttcttttctttaatgaaagcggtatacatacatagtatatgtacctatctatacggattgtttaaaacgttttgggggaccatcagtagcatgaaagaggcccagaggtgagtccaaaacaccaaaacaagcaaacaaagaaagaaaacctatttaagactacagtaacaaatgatagagaacttgtaagttacaggagtaaatatgtagttttaaactatcctgttctatttgtgagtaaatcttttgagtaaattgtttcattgtataatatggaaataccttttaacttgcaaactttatatgccccagcacaggggaacgctggggccaaaaagtgggagtgggtaggggagttggggggagggtatgggggacttttgggatagcattggaaatgtaaatgaggaaaatacctaattaaaaaaaataaaaattaaaaaaaaaaaaaggaaataccttttactttcttcaagtagcccaagttggccttgaactcatgatcttctgacctacaccatctaaatactgagcttttttttttttttttaaagacaaagtgttgcagtgtagcccaggctggcccaagtttttgagcctccagattccctattggcaggattataggcatctgccaccattgtttggaaaatgtttccatctttaaaaggactctctgttactcttgtttcctgtaaatttgcttaagcttcttcaaggtctagctgatatcccaaaacaattgagtgaagttgacagctttgggcattctgtttgttttcgtttgaggcttggctgttcttatgatatgcctaaatacaggaagcttggttaaatggtttctttagtagatgaggactaggaagtcaaagccagacagcactagttgtttgtttgtttgtttatgagaacatacacttcctctattgaaagtgtgttttggtagaaaattcttggccccaaaaacagatatatcaaatcacattctcatgtttgtgaagtatgcttactagaaggaaataaatagaaaatattaaagtaagcagttgttaatctgtaattattcaatccagataatgccctctgtcacctgttagactgtccacaggagataagactcctttgaaggagtttagcatctaccagaatccagcaaacctaacggtctgtgggtagatattctgagcaacttattcagagccagggcttctttaaaattcaatcagagccgaggcaatctgtgcattcatttggcctcgggtcatttctgttaaattgagggcgtattcaaagtggttacaagataaatgacaccttgatgacatttctggaagaaaaaaggctgcatattatagtagaataataggcagatttagagttgatagactaatagagttgggaagcctgccctgtgcttaccgagacaagttccatttctttgcatcttcctcagcctccctgcctgtatgatgtggataatgcctttatgtcatgcatttactttgtgtaataagcatttctttattttacaaggctaggtactgagagtagagagaagctcagggtctagcagaaaaaaaaaaaactctgtttactgaattaactagattatggagatagtcaggcatccttataatggcgtgaaggcaaagagattgagagtgtcactgtcatataattaagtccttaaattaaataagtgtcagggtaagagtctcagtggttgagagcacttgctgttcttgcagaattcccaggtttggttcccagcacctaaatggtagctcacaaccatccataactcttagttccaggtgacctgatgccctcttctgacctccaggggcaccaggcatgtatatatggtgcacatacatacatgcaggcaaaataaaataaaataaaaatttctgtcaaagaaatgtcaaagaccagagaaatggttcagtaggtaagatgccttgccacagagcctgacgattatactggatctctggaatccagatgaggtggcacttatgaaatccttgcatttctacatcgagatgggatgggagacaggagagttaccgagatacttgtaggtcagctagcctggaatacagtgtcttgaagaaacaagggagatcctgtcccaaaaataaggtggaaggaaagagctgattcccaaagttatcttgtgatagccatatgcacatgcatgtgtatgctcgctctctctctcactctctctctctctctctctctctctctctctctctcacacacacacacacgcacacacacacacacataaaataaaaattttaatttaaaaaagcagttctctcgggcacaataggcaacagactcactcaagcaagggcacagtgagggtttacagtgaatttaacaagtttctaagcctgagctcccagatcactatggatctgcatagtgatctttgagatctggtgggaatctatggactatagagtttttaagtaatgtaatgtaatgagacatttaataaaacactaattaagaagccaagccagatagcgtatatgtacctgtaatcccagcactcagaggcagaaggaccaggcatttagggccatcccctgccatatacagaggctataggacagacaagacagacacaaaagagtgaatttctttgctttgaactcaaattatgtgaaagcttagaaagtaactatagttattgctttccagaaacccttaatatttaggttagttttaattattttctttatttctttttaaaaaaaaatatttatttatttatttttcatatgtagtacaccactgtaactgttttcacacaccctggaagagggcgtcagatctcattacggatggttgtgacccaccctgtggttgccgggatttgaacttaggaccttcagaagagcagtcagtgctcttacccactgagccactctccagccctttaattattttcttaagctgggaacaatgcaggctaccaagatgggtcagcagtgaaggggcttgccaccaaccctgactacatgctctccattcctcgaacccacttggtgaaaggagagaaccagctcctgtaagttgacttctgacctctacagttaagatcttggcacacataggctgccccaaacaaacaaaataaatattaaaaaaaaaaatagtcttaagcacttggcaaatgaaatattagcagacagggtgaaaattgaatgaacaagggaaccttgttgaaaggctggaaacccctggggggtgtgcctgttgtcatgggttgagagaggtgtgaggagaggggattcgagcttggcagaagaaagtacacaggagccaaactgcaaagcagttggcacagcagagaagttcatccgagctctcctctggaagcaagctcatcagaaaagcaaagaaatggtccagggccagaagatacctcaagagaggcttttgagatgttttgatgaacaacgagtctgttctagggccagggcagaaacaaatgtaaaggcagcttcggaaatagaatcaagagttcacagctgggctggcgaggtggctcagcaggtaagagcactgactgctcttccgaaggtcctgagttcaaatcccagcaaccacatggtggctcacaaccacccataatgagatctgatgccctcttctagtgtgtctgaagtcagctacagtgtacttatatataataataaataaatcttaaaaaaaaaaagttcatagccatgatcttaatgtctcaagagggtgagaaagcaggtggtgatgtctgatggcaaagtgtttcagtgtgaggagagaagtgggaggaagacattgggtaagaggtttggctttctgaatgcctgaattcctgataaggggtggaacctactgctgagctatggtaaaagggatggcaaaccataggtaccatgaaggtttgtttggagagaaaactgtaggctttggttttccaggaagagcatgcagtacaaacagaaagtacttgctaggaagagatgaaggctgtggggatggcagatgagagtgtacaaaactggtcctctaggaagcagggacctctgtgggtcccttgataagggggatggaatactgtgaaaccctttctggagatagctggagagatctgggacagtgctcactgggaatcccaaacatgctctgctacactgaagaagttgcaaaccaggtggtggtggcgcatgccttcagtcccagcacttgggagaccgaggcgggcgaatttctgagttgaaggccagattggtctacagagtgagttccaggacagccagggatacacagagaaaccctgtctcaaaaaaccaaaagagagaggggaagaagaagaagaagaggaggaggaggaggagcagcagcagcagcagcagcagcagcgctttcagaagtggctccagatcatgttctaaggagtcgtgatttctttgcctcctctgttgcaagccatttagcacagctgagcttagtgtgaaattcaccctggatatcacgatacattgttttgtgagcctttaatagtttgtagtaatgtttatggtcaggcagtttgggttatattgatctggatgaaataacaggcagctcacagttgcctattaacttcaggtccaggggttacatcaacttctcctggcctccacaagcggcacaaacatgtaacctacacatacaaaacaaacagacacacatactacacataaataaaaataagtctttttgtgggacaaagggtagggagcaggaatctgggtctctgtgtagccttggctggcctcaaactcaaccgaggtctgcctgcttcccaagtgctaggattaaaggcatgcaccactaagcccagctaaaattaaatctttttgttttgttttgttttcaaaaaaagtttttaaataaaatggagagcaaccaaggaagacaccagatgtcaccttcagacgtgcacaggggacacatatacatgcaaaaataaatatataaataaaaagtataaaagctcaagctgggtgaaactgaggagaataaaggcagagccatggagatctgtactgggtctgactcccaagtgctacctgcgaattctttcattcttgaataagttaagggttttcatcatgtttgaagtagtgcattcatgggaagataaatgtctttctgttctccctcttttcctccctctgtcccatgcctgtgtcacctctgtccccttgttatccctgcacttggcttgtagcagagtctggctgcttgcttgctgctttcacagtcaggggcatcgagcatgcatctcatgactataattgggtgatctacagacccttatgtctgcactgtcccggtgatgcatcttaattccagctgtagcatgaggaaggagccaaagtgagcactcctagtatgtgacagccaccttgtcacacaccccagcctgtaacacagaacgtttgatacggtttggtttggcttggttttgaaatactcacagagcacccatgaggctggggtgaggctctcttgaccttagtagttctagactagcttggacaataggtagaaagtttaaaaggaattagactggcccttttctgtgggttgtcatctggagttatgtggcaagatttttattttcacaaattaaagacttacgacttcaaagtttaaaataagaaaattaacacataatttggcacttacacttatcttatgtatttttgggtttttaaagacaggatttttactttgtagctcaggctggccttaaaacttggtatgttgcccaggctggttttctggagatcgtctgtcttctgagtgctgggatcatggggtgtgccaagataccttacagattgtactgcgagagacttcagatgaggttatattaacttagtcccctgactgactcatagctttgctttgtgcggaacatagttacatatatttggaattggcatggtctttttacaagatttgaagtttttatctatctgtttgttttgtgtgtatgtgcttctgcagtgtatgctggagcacccacgtttgaagatcagtggcaaccttcaggagttaactctccccataaccataaaatcaaactcagggtgttgggcagatcatgcagcatctttaccagctgagcccaccacacccatgcatggttttgaaagctggcagataagcccagggaattcctgctgttccaccaggaatcaaaaacagttcagctgaaaccagtgttcaaatctttcatccagtgtacaatttatagagtctgctgtgtatctgggatgtatgacccatgcaaaagagacactaacagtaagaaaaatcattctgtttgaacatgtgaaggactcacagagtagtcttgactttggatgtatcaactttggttagccaagaagcctgttaggtaacttcattataagacagacttgtgtgtcgaggggagaggcctaaagccagagataaaaaattgggaattcctgcagtcaagtcaaattcagttcctatcctctcatgatgggagctggcccaaatggctgccacagcaagttctgctgctcatgggccctgtgtccccagccctgggacctagggataagtttggttgcagacattgcatggaaaaaaaaaaaagaaaagaaaaaaaaaaagaaagaaagaaaagaaaagggaattgccaacacagatatgtgtttaaagctatgagactggctgggatcaccaaagtagttaaacctaaggagagactcttttaagtgactggaaagataaagaggaaccagaaaatggaactgagaaagaggatcatagacgagtgaagaaatatttttttcattttcaaaatttttataactacattcccctgttaccttttctccctccagttctgcacgtccctccccccacatacatatacatacaacacaaatatgtaaatacagcctgtccagttcatataaagttcgttctgggtgtcagggctgaccacttcgtattggatacacgtgcagggctgagagagctcttcccattctcagcagtccccagtggctttttctttagggttgaaatcgttcgcgctctcccccttccgtgtgtcatgtccactgtgcaggccttgtttaggcagccctgttgatgagacttcagcggtgtagcttctctgacatttctagagacacaatttcacaacacacttcctgttcctcagatccttactaacttgccacttcgtttttgtttttgtttttgtttttgagacagggtttctctgtatagtcctggctgtcctggaactcactttgtagaccaggctggcctcgaactcagaaatcgcctccttctgcctcccatgtgctaggattaaaggcgtgcgccactaccacccgacaacttgccacttcttcttctgaaataattcctgagccttatgagttatggtatagatgttgtgcttagaactaggtaccacatggtcccatggtctcctgtcctctgcattttaattggttgtggttttctgcaatggtctctgcctgttgggtgggggtgggcaggctgtggtggcacacgctttgaatctcagatggatctctgtgagtttaaagccatcctggtctcagattgagttccaggaaatccagggctacacaaagaaaccccgtcttgagaaaaagaaaaaaaaaaattaggaaactaactaggcatggtggcacatacttttagtcccagtattcaggaaacagaagcaggtgggtctctgagtttgagactatccaaatctacaggttcctggacaatcagggcgctatggccacttagagagaccctgcctccataagcaaacaaacaaacaaattaggaaatatgctatcttaggaaccacataaagagtatgtttcaagaattggggtaggggaaagtgttgttgggatggatacgtaaagaataaaaattaaaaagaaaaaaaaagtatgtttctcaaagtacaggactggccctgagtgtcattgtgaagtcagtagcgagtccagtaagaactgccttagtactctgtgggagtttggttgcaaaaagaagtaagtaagggattggagggtaggtataagagagtagttggtttgcttgattgtttttgtttttgcttaatttagtattgggactttcagggttctttgagagggggctatgaaacagagactttctgtgtagcccaaattgatcttaagctcttaattctgcccctgccttcttgatgctgggaatatagacttatccaccaggcctagctcattctgattttaagttggagggaattacagcagattgaatcctagccgtgtgtatcaagctgctctagtacagtaccagagattgagtggctagaaacaaccaaaatatttttctcacagttgtggataagaaagagagaggtgagggcaagatggtactaaggataggaggatcagtgacttaaagaattaaaaaattaaaaaaaaaaggtttgtttgttgggcgtcaaagaagaggaagcgagcaggagggagaagggctggtggttgtgacatgcttgaatgtggccttgatagagtcaggggtctgacaggaggggctggtgcaaggtagacacagtaaaactcagagaactgaggcgaagtatgtaaggtcaccagcagctaaactcttccaggaataagctagtttcctttgtgagggtcagcacaggaccattaggagcggtgatggatgggacagtctggtcctaataactttgagggagaagtggaagaaaatgagccagaagtagcaaagagataaaaacctggtagtcaagagtcatggtagcggaatgtcctttcttccatagggaagcagtattcttagagtaagttccaggaaagcaagcatcagagtgaacgtttggggaggggccagggctcagccaataaaggcttactgtataagcatggggacccaggtaaaaacccggtgtggtcgtgcactactactgtaatccaagaccccggggaggcagtcagggagagccctgtggctcagacctccacagagatgtacatatgtgcacatacaagaaagttcgggggaaggaggaatgggtctcaggaggtggggaacgggaagaggagaggactcagcagggatgttcccatcttcatggtagtgaggatgtggaaggaagggaggcctaggagttgggagctttttatcagagacttgagcagataaagggcgtaatgaagttagttgtcctgttctagagatagatgggtggcaaaaccgtaaatgttgaggggcagtggactccccacttctcttactgatagaaccaagtgtctttcagtgatgacataagtgcaaggtgtcttggattgctttctaactttgttcatttttcatctacaggtccttggtaatcatcagcactttagatggacgaatcgctgcactggatgccgagaatgatgggaaaaagcagtgggatttggacgtggggtctggttccttggtttcatctagcctcagcaagccagaggtaaggaaagtcaagttgtattgagaatcgctgctgtgtcttgtgaggctcgagtgtagcgcctcacttagagacttcgaacagtcacttcacctgtctgtaaaatggggtggatgacagcacccgtttcttaggatcgctgcaggcattaaatgtgttaatcatatcagtaacagaggaactgtgtccgctgtattgtacagcacattatctgatggataacatgatcatcttttcttaagatcatcttcggctctccaaggagtaacaattattgaaaatttctagttagaaatccgtgttgcagaattctatgctttgttattctctacattttttttaagtcttgtacatcctaattttcttttttatatggtccaaaccaagtcacttaaaaatgtgtgtgtgtgtgtgtgtgtgtgtgtgtgtgtgtgtgtgtgtgtgtgtaattggagtggaggagatggaggggagaggacccaggcacataggcacacatgtgccaggttgcacatgtggaggttgtaggtcagccttgtggagtcagttctctcgttccaccgtgggtcctagggactgaagtccagtcgccagaccagacctgtgaggtaagcacttttacccgctgaatcatctcagcagccctaaaggcaccacatttcagtacactttattaattgtagagcacttgtccttcctcggtatgagctctagaatatggagagcagcagattcagaccatgcttctaaaactactccgtctccgtcccttagcagtgagttcttcctcagtgaggaatggcccaccccagtgcgatgggatggagagaggatacaagagaggccttgaggaaataagcctattttttagtatttaatcttgcctctggggcgcctcctccttctgagctttagtctgtaagtaaatctctctctagagttgcggcagctgacatgcagtcagtcacctgtctcctcccacatcagtcctccctgagtgtggacaccctcacagtagtcatctcttacaaaactccctagccattgtcaagctgggaagagacaaactcggacatgaggggtttaagaatgacttattaacgttgtggacatgggcactggatacaccactccaggcctcccttctgtaaccacacttcctgtgccctccagcaagcacagcctgcatcatcctgcaatctccacacatcccagtgctaggcctggatcgagcagtgtttgttatgctccgttttttgtcacatgatgcgctgaagtgtgttttgagactagtgagattctgtggttaagaacactaacactaagaacaagttgactgtctttaaactgaaatcaagttttaagaatggtattcaagggctggagagatggctcagccattaaagactagacgtacaaccaaacatgtaagaacggtattcaggcctggtggtggcggtgtgcacctctaatctcatcactcaggaggcagagacaggcagtttgagactagcctggtctacagagcatgttccaggacagccagggctacacagagaaaccctgtctcaaaagccaaaaacaaaaggaaaggtattcacatgattagtgttattctcattaaacatgcttatttgtgctcttctagaatcttccttatttttaaacttgatgtgaaagacgatcagcaaattgagatcataaaccacttacatctgaggtaattttagtgtgttgtgtggttcaaagcatgtgtggatttgtaaacagaaaatccacacataaaattgggtgagctgtgtggcatggccaagtggagaacaaacagctgtactaacaagtcctgccagacgtgagcaagcgcttagggtcattttcagctgcatagcaggtttaaggttagccaaaatatccatgggccggtgggatggctcagtgggtaaagctgctaggatccaagtctgacaacctgagttcaaacccagggtccacatgatgaaaaaaatgaactcccatacattgtcctttgacctgcgcttgcaccctatggctgtaacccacccacccacatgcacaaataagttaattaattaatgtaaaatttttttttacattttgtgtctctgtgtgtgcacgcaagcacacacgtgcacatttatatgcatatccagaagccagaagagggtgttgtatctcttggagctggagtggcaagaggttgtgagccactctgtgtgggtgcttaggatctgaactcagatcctctgtaagaacaagaagttctcttaattgctgagccatctctctagacctccaaaaattaaaagagagagagagagactgctatacattatctactttttgatcatttatgatgatagcttaataatggttatacatagatatgttaatgacattgttctcagtgttataatatatacttgatgttccttatagtcatcctcccaatgttggcaagtcaatcccatttaaaatgttaaaaattgaacctcggctgtgatttacttgcagtatgataaagactcgcctggatgcattgtgtgtatctgtcctggagccttttctgtgtgttctgaaacagtcttattgggtatcctaggatagccttgtattggtatcccaggatagccttgtattcatatcttctgcctcagccttctgagtgttaggattataggcatgtagcatcacacccagctatatatctgtttctataatattaaaattaaaataaattgcacaggtagatgtatctctatgagttccaaggccaaccttggtctacttgagttttaggcaagctggagctatacagtaagactctctgtatgggaagtaaaacaagagagagaaggggagggggggatagaatttacagaagatttactagttaataataagcccaatgcatgatagcacaacgtgctatcagtatgaaagaggcactctttttacatatttgcaaatctcccccacccccaacctcccttttggatttttcaaggcagggtttctctgtgtacctctgattggccttgaacttaaaaagatctgcctgcctctgcctctcaagtgctgggattaaaggagtgcacagcaccactgcctggtgacaactagatttttataattgctttattaaatacattgcattgttgccagatatgatggcaaatgcccatagtccctgcatgaggaaatagaggccagccttggctatatcatgactaaaggccagcctgaaatatatgagacctgtctcaaaaaaagagaacaaactaaaagtatactgtacttttgtttcaattatatgaagaaaattcaaccacatacatcggtcatttggagaagggaggaatattttagtggccttttgctttggtttgatactgacccagaacaagtatctgaaagagtctgaatctaaagcaattaacattttaaagaatattttttatgtgttattgggtttttattttgtttgtgtcagggtctcaccatgtggccctagctgccttgaaacttgctgtgtatacctgctgacctcaaactcgcagaaatctgcttgcctttgcctctggagtgctaggtttaaaggcatgaaccactctgaccttatttgtgtgtgtgtgtgcgcgcgcgctcgtgttcctcatttgtgcagtgctcagagaggccagaagagagtgttggatcccttggactggaatctgaggtgcttgtgagccgtccagtatgggtactgggaactaaaccccagtcctctgcaagaacagcaagtgctcttaactgctgagctgtctcaccagctctgttatactctagtgcagtaacatccactagcccatcttgccttttacaaaaacatccatggttttctgacttccatagggaatatagactataagttattaatacatagtacattggaaaaaaaattgagnnnnnnnnnnnnnnnnnnnnnnnnnnnnnnnnnnnnnnnnnnnnnnnnngttgggttgggttgggttgggctgggttgggttgggttgggctgggttgggttgggttgggttgggttgggttgggctgggttgggttgggttgggttgggctggggttttggtgttgggattgagggctttcctgtatcctaagctaggttactactgtgctactacctagcctttagacctccttctaagtactaggaaactgcaggtttactcctacagacacagcctaccttgtgttctaattttcgcttgaaaactcaaattttatcacgggtactggcagctgttttctttgatgtgaaaagcctactttgttcttactggggaaatgtctggtgtttcccgagcctcatctccgtcgctggtttcagttgatgaacagagtgaagctgctaaacagagcagacaattcagtccacacaagtgctgctcctgagctgcctcagatgcacccaagtgctcagcacacgtacgccctggttagtcacaagagcaggaagaaggtagtactagggccaagagctaataacatttatcatggttgttgcttcaaatatttttacttctccatctgtttctctttgtctctgtttctctgtgtgtgtgtctctccctccctccctccctccatccctctctccatctttccttattctcattctctttcctccctgcccttccttcttcaggagagtcttgctgtggagcccactgtcttctagaagttacaatccccctgtttcagcctccagagtgttagtgttacaggtatttgccacagtgcctggcaagcgctttagtgctaagaattaaatgtgaggtcttatacatgctaggcatgtgctctgccactgggcttcacccccaggaccatcaagaactgcttcttgttgtttgtttgtttgtttgtttgtttttaaaacagggtcttattatgagacagggctggccctgaacttagaaatacccacctgcctctgacaagaacatgtatgaggccagaaacagtgattcatgcctgtaatctctgaatttcaaaagtggactcaggagaataatgatttctagaccagcctgggtcatacattgagactctcttaagaagacacaagcaaagccagacacacggtagccagatccctgcacttggggcagagtttgggagacgtaaatctaagagttcaagatcgttgttggctgcatccaggtgacttccaaatcatcttggattacatgaaaccctgcttttaaaaagtaagcaaaacaaacagataaaaaacaaacaaacaaacagaaaaacaacactcacacaaaaagcttgcataaagccgacaaagtaaatgtatttgctgtataaatatgaggatttgcattgggatctcctggcatggggtgaaagctcgtgtaatggtttaatcctggaatcccagtgctgagaaaatgtagactggaggacatcaagactttctggtcagctactcttgcttgatcagtgaactgtctcgaacaggaggtccagagtgattgaaggagatactcagcattgacctctgacctccacatgcacacatgtgtatactccctcccacccctcaagcacacatatgcacgtagcccgtatgtacaagcactatatttttattaaaagtacaaactcattaaacattacacatcacagtatgtaggttcagatcccattgtatcctggtttgttctgatgtcgtgaactttttctgatctgcaggggtctataaaccagtgtgtcgtgttgctttagttgtgtgtcgtgttgctttagttgtattttggctgtgtaggtgaaacttcctggtgcacaagggagagtgacagctccatgaggagcgaatagtgtgaattatatttagaattgcatgtggcaggaaggctcaggtgccttgggacacatctcatttgccaatccttcctgttgacagggcacccacaaaacttcctcaaaagaatgttgatccgaaaccaacctacagctgtgcctctgagcgtgtgttgggatgaccggggaaccaggttcactctgggaactttgatagattatgctccctaggaaatgaaccactatttttggacaaccagtagctaagacttgtgttttaaattttcagaaggacctcctgaggtgaaatctgatttgctttttctttggtaactgaaatatagtttcaaccttgaaaaggtatggagatttggctatggttccttaatgactgtcttaaatttttactctaataaataataattcattctgtagtgtgttttttctttggaggtccctgggcagcctttggaccacacttacatctaaatagaataaagctgtcatggtagatattgggtaaaggcacttgctgctaaacctgagaaacttagtttgatccaaaccaatatggtgacaggagagaacctcaaattgtcctctgacctccaccaccgtgtcatggcacatgcatgcgtgagcatacatgctcttgcacacacacagaataaataaatgtaattttaaaacaaaatcttggctgatgggctgggcatggtagcacacttttcaatcctagcacgcaggaaacgggcaaacaagatatctgtgggttcaaggctagcctgatctacatagtgatatctaggcaagccagggctacatagtgagaccctatctccatcaatcagtcaataaataagtttcaatagactaaatgtttttgactcttatttctctgtgtcatgggacacacatttatttatttatttatttatttatttatttatttatttatttatttgcatgcaggcaatctgacttttagttaggatgcctttatgaagaccatttcaagcgtgtactcgtctgcagctaacttgtacttagatggctgctttcatcttggactttaaacacagcatgctactttctggttttgcactatgtctgccccccttttccccctaaaaagagcaaacaactctattgttagtctatacttactttgaacttaagagttttattttattttaagcatggttatccccaggagacgagcatttctatttcaaacaggtgcatacacagacaggtgcataaacagcagacagcaatgaaatgctgctattggtggagagaagtgtgttccagcccaccttcaccctggtcagcacaggggcttcctgcctcagccgtacagtagcaggattaccggcatgcaccaccacactggtctgctgaagcacctttgaacagaaggaactagagctggccatggtggcacacacctataatcctagcacttgagaaactgagacagttggattgttagtttgaagccagcctaggctgcatgaatgagatcctatcacccaacacaggaaagcgggtgtgtgtgcacaccacatgtatagtgtgctattcatagttaactctgatttgttcacaaacatgactttcatagaaactgtgttactttattagaactcagttgggcatgggtggggcatatctataatctcagaatttagttcaaggtcagcctggactacacagtgagaccctaacccctctctcctcaaaaaaagaaagcaagctgcaatctttctctcttttctgctagaaactgaacttaggctgagaagagggaaccacagtggtgaaaacgcctctatgagattgttctggaggcagagatgggagtcgttttcctagtgactgataggcgagagctctgtccattggggtggtgctgcctctaagcagtggtccaggcatatataataaaagcaggctgagcaagccagtaaacagcattcctcatgtcctctgcttcagtcctgctccgtgttccatcagtgatggagtatggcctgaaataaacttctccaaattgcttttgataatggtgattcctcacagcaagagaaaagtaacttagacagactttatgaactctggagaaggcctgtgtgtcctttgcaatctctgaaatgttgtctaattgagggctaaagagaaacctcactagataagatcactggctgctcttgcagagggacccaggtttggtttctagcctttaactctagttacaggctatcttctggcatccatgggcactgggcacacatgtggtgcgtttacatacatgcaaatactcaaacacatagaaataaataaatctttaaagattgtctaatttatactaaaagatgcccaagtcatttaaattaattgtgtatgtgtgtggatgagacacagagaaagacagagagagagagatggggctgggggctctcagcctggaacacatgtattcctggctggcctccacctcttcaccctcctttctcagtcttccaaatgccggggttacaggcatgcaccagtgtgcctggcgcacatttcttttggtttgaacattaaacggtgctttttgaaccagccaagtcatcagctgtgaagtccgttctgaagagtacctgtcaattttgcagcaagccagtatctaaatgattgcttaattgcttttcattatagaaatgaaactggtttgatttaatttttattaattccttagtgtggccgaaagcaatctgaactaaactaatttattctagcacgagtgttgccaaatgagaaattgagattactccacagctattgtttaggaaacggggttctccctgtgcgttgtttttctattttatgtgttgactagttgtgtgtgtatgtgtgtgtgtgtatgtgtgtgtgtgtgagagagagagagagagagagagagagagtgtgtgtgtatgtgtgttttagtgcgtgcgtgcgtgtgtgtgtgcactcgcgcacatgagagtgtgcatgcgtgtgtgtgtgtgtgtgtgtgtgtgtgtgtgtgtgtgatgtggggaagggaggtttcacttgccaccgcactcttgcggaggtcagggacagctctgtgtagtcagttctctcctttcacttgagataggctccaggcttgacctctgggtatccggcaggcagggtcttgcccactgagctgtccctgggccccttctcttcattttctttgtttattttatttttatttttattagatattttctttatttacatttcaaattttatcccctttcctcatttcccttccaaaaacccccctatcccattccccctccccctgttcacgaacccacctactcccgcctccctgtcctggcatttccctacactggggcatcgagccttcacaggaccaagggcctctcctctcattgatgtcccacaaggccatcctctgctacatatgcggctggagccttgagtccctccttgtgtactctttggttggtgatttagtccctgggagcttgggggggggggggaaggtgggtactggctagttcatattgttgttcctcctagggggctgcaaaccctttcagttccttgggtcctttctctatccttctcttcattttcttttgagcatgtcactttgggtgtgtcctaataactggatatatcagaagctctcaagcccctcctgcaggaacttcagctcctgttagctgtgaagcccctcgtcatctgtgaggcactgtccttagggattccttagtaaccttattcgtatttcccccatcagtaactttggcatttaaggggaaatacagactgtttctatatacagcagtgttggggcttctttttgttaagtcacaaataataaagggtgtagtcacttattcatctggtagtggagtcagtggtttattttggttaggaattgacatttttggctgaggatatagctcatttggtagagtgcacaattccctgggttcagtcaccacccccacataaaactggtatggtagcacaggcttgtaataccaggagtgtgaaggtggaggcaggagaatcaaagtttagcatcatcttatattatacacatagaggattcaaggccagcctgggctacatgagacactttcaactttttaaaaagttcccattttatgtcctacacagagtacatcatctttaaaaaactgaaatattaaaaatataatgtcttggctctatagagatgtggctcagtgggcttctcttccaggggacctgagtttgagtcccagctctgacatcttagctgcctgtaactcagagaagtttagagctttaggcagagcatcccgcagaacccaagggctccctacaatcccttcttcttctcaacactccatgcatttcaaaaccttgagttcccaagacattaagacctctctccttacaggatgctaaggaagtatttgactgttcggaccttgtatttccagaggagaggtctgagctgcacacagaacagtgttagtgtcctaggaaccaagaacttggtcaccttgagagtagagcaagagacagctgaagattagacttttagaatccagtttcttaacattgagactgggacaggtggagaaaacagtattcagagatggagctggttttatgatttttataggtttttctgcattcctttcaatgtctttaactgctgcttggtgttaatacatactacttttttttttttttactttatttttatttattttttgaaaccgggtctcatgtgtcccaggcttgggaacctgaactcactgtgctgttgaggatggccataacacctgagcctctggcctctacctcctgactgtggtattacaggcatgcactaccataccagttttctgcagtcctggggatggagcccacactaggcaagcattctgccaactgaattacatccacagcctctaccttaactattttaaaatatacatgtttcacagttagagatacctggcctatttggcaaatgtgtctcttgtagacaacccccttgatttattagagtctctttacaattcttatagcaaagggaatgtcaaaatcctttccattttgtttatagagggattggggaagcctaaaaaggaggtaaaggagagatgtgtaagcctgtttataacaaaagagcttagagactaggagaggtgaacctttaaaaatagttatggatgaggggaagaaaaacattttaaaaaaacagttatggaagggctggcaggatggctcaggtggtaaagatacctgccaccaaggctgacacctgagctcatttcctagaacccacagggtgaaagaagagaactggttcctgaaggttgtcttccaacctcattcatgtatgcctcttcactacagtaaacattgcttttttacacagacagacagacagacatagaaagatagatgaaatagttgtggtataattatgaaaatcgacagaagtatgtcaatgtaagaaatgtaagaaagacaggtctcccagcaagtgtgtagtggcatgagggacctgaggagtggagccgggtgaggggcagagcagtctgtcatgtgccttggcttcagatgcagcaagcggcgtggctaataaataaagctgctgttgtgggtggacagtgcccagcttcgtgcttctgatgagtactgtccatctattttgcccctccctaggattagtgagtttcagtcttggttcctggcatctttgttgttgctgtgctgtgctacaggtgcccctaccgtgatggaggagggcaggggagtgttcccctgtcgttagtgctccagggtaactgtcttcactgttctctctgtcactgatgggaaggttctcatccttgccccactttctcttcaccttcccatgtcattctttctcacccacgctacagccggaacttaagtctctagctcttcccgttggtgtattacaaagcagactggcatctctaggtcacaggagccattttcaacttcggtcacactgtgcgtgaattattactggatacagctttggggatttgataatggttaatgtctgagtcagttattgacaaaacagttgtgcatatgcgtctggctttcaaagcagaccgagaaaaaaaaattagaaaaaaaatctaagaagtacagataaagcaaatacagattacgaaccattatcttattctgtttaggtgaataataggatcatcaactgacactacaatgaaaaattgattggggaactttttaagtggcaaaattgagctgactccttagaactcaaagtttggtagccacattatcaaaagtggggcagacaaataatctgcaccttatggcataacacagggctctgcacgctttttatgtagaggttcagatagtaaatatgtaggtgtcagataccttgggcatcgaaggatacatggtctctgttgctattataacaatggttgcaattatagtgagctctgcagttgctgctcagaagtgctcatggatatatgcaaatgatagaatgtgtgaatgtattataagacttttttaaatgaaactgatcgggcaaaatttcgcctgtgcagttcacagtctcctaacacaataggaagtagtaccagatctgaggcacacagtccaggacatgcatgggttaaaagaagttgttaaggaatgtgtgaagtcctggatatggcccttctataggacattgaatcctttctccaaaaaggagtgattctctctagagagatggctcagtggctgctcttgcagaggaccccagttcaattcccagcacgcagatggtggctcacagctgtctataactcaagttccagaggttccactaccatcttctggcctccttgaccaccaggcatacacattgtacacagacatatgctcaggtaaagggcccatacatgtaaagtagaacaataaatatataaacttttaacttaagaaaagggatctgaaagaagccccttctgtggtgtgaggaatcagacagaatgtatgtatgtggactccctctataaagttagtctttgggtcgacctgagatgtgaactcttacgttcttacgaaccatctggccaagtgtcagtagttattggaaatcaatacacgagggctgccgcactggcctcattacatttcagacgttcagaatacttcacagtaagttaaagttgagtatgtgggcacacaggaagtgaagacgacagccaggactgcacagagaagccctgtctctgggggacgtaggaaagaagaagtgaatggaaaccgttcacacagccggaggatttgtttttctctaatagtgtttgttcattttaatgtccttttcctgttcttcattcgacgttccttttccccgtggaaaccagagttcttattcccactgcagtctttcggactgttctgactacatgtgcacatgtgtgtcacttagagttctgttcaggatcagaagtcaaatcactttacccagctgttagttcttggtaattgcacagaaaagcgctctagatctttggtattgagtttgctaaccagtgtggcagatccttcgttttaaaattatgacgggggggggggggagaacaaatagaggaaataaattcaaaatagcaagaattgatacttcgttaaatgaccaaagagaaacccaggtcccataattagcttgaaacgcagagcagcggatcagaacgaatagctgctcccggggacagatgggtggaatatggttatgcatcatccgtcactgcaacctacattttttttttttctatcaagagactcaaagctgactatcggagtgactcattcctttgcttagaggatgaggtaatgctattgtgaggggtgatgtcatcgctacctgaactgcatgcatatagatcactgctcaggctctccaggaaaagcaccatctgctttgatatccacagcctgaaaggctttgcagagattggtgcaaaggtcgccagcctcaagtatgactcataggcagccaatcagcgaagagcggctgttgaaaaagtaaacttctaaaaccataatccaaacgtatgacaggatgaatcaatactgaatcacatttcttatatcgtgtgctttgcactcactgaagttaccaccattgaaggattaacctctagatataaagccattttcaggtggtcaggcatcacaatccttcttggttgattaaagcattttttttctaattggcgataaattttctgttactttggagtgcataggtcgttcagtgcatgtgagtttgacagctgctttctgcagataggacctgcattcccttggaaccagctgctactctaggggaagagttgctagtaaaagaggacacatgtcacaggaggtgctcgctaatggtggcagacccactgagcctcccttcatttcggtgacagtgtccctttggatttactgcaatccgattctgtcattctgttgtgtagagcgtcagattcctaacagatgatagaaaacagacgatagtgaatacttgatttccttcatttgtaccttgaaatggtatatcatctgcatattgtatctgtatctgaaatggtatatcatctgcatattgtatctgtatcacaacacacatttgtcgtaatggcaactttaaatcagatagtcttcaaatacaaagtcaattgtgttaagtagagtgtgctgttatcaagaaatataaggaaggagggctggagaaatggctcagttggtaagaacacttaagtgctctaccagaggacctgggttcatttcccagtgcccacatagcagctcacaactgcctgtaacccatgcatgaataaggtttaagagggacagagatacaaggaaacaaataagtagaaattttaaactaagtaatatcaggtgacatacattcgatgtctttggagaacttatgaaaacagcagatactagctagacgcgatggcacatgcccggtactacatagtgagttctagggcaacctgggctacaatatgaaatctgtctcaaaactgcaacaggaaggccatgtaaatatcctatttgttatcaaattttctgcctagaaataacattaataattgttgcctgatctaaattttttactgtcatggttaaaaaatgcaattttctcagtcttccctttaaaaaaatttttattggtacttatttttttttcattagtctgaacttaggaatttctctcttttctttgactagtgcttcctttgtctggcaccatgtgtccatacttgtcttttgtcataatgagatggtaatggcccatcttgtatccactccacctcggttctgggctcccatttccttttggtagaaaattaaaatctagatttttactgtagagttaattaacaatcactggatacaaacaaattatcagcatttctgtgtctggtaaatattcctataattttgagatcctaacagtttgaggctataatagagtctcagcttcggttgccacagaaagtgaaggagagggctgaatatgttacagatcagtggtagagcactcgactaatacgacgcattatttcactgtcagtatattaattcactcaccagggcctgaagcccaaggttccatccctatcctaggaaaattagatacagagtgggctggagagatggctcagtgggtaagagcactggctgctcttacaaaggacccaggttcacttcccaccacctgcatgacaactcacaaccatctaacacctgctccaaggggtccagcgccctctctggcctccatgggaactgcatacacagtacacaaacaaatacaggcaaaacacataaaaataaatacatcttaagaaaacagagatataaaagcagagaggctgagaagtagagcatcagccccttatctgggaacctgagacctttggttcaattcttaatgtatactaccagtatttgcttggattttgaaacagataagtgataccaggttgagggccaataggattttagtgggaagttgtatcagaaggtgtgccagggagaagaaacacattgccagtgaaaaatgagtggtaccaggaatggtggtgtgtggttatgtaaccataccagattgctgccacacggggaaaagggaaggacatgtgacaggaaggttgttggaggtcacacttacaggactctggatgtcctccacaggatttcaagtccttaggatttggggtctttggttagaagctaataaagagccattgaagatttttcaatcttgtcgtaacaagcttaactggcccagagggattaatctaagagatacatcagcttaaactgggggaattgcagtggagatctgtgaggaggttctgataagagctcaggtcagacataataaggatctgaactagaatatgaatggagttaggacagtggtcttcacctgtcttccagacccggagtttaaggcagaggtcaggaagcagagagtgtgcgttgactcccagcttagagctacttaaagaaagcctgctgctccagcaacccaaggcatccatctggggttctgtgttaaaccagtaaggctgatgtttgttttaaagagtttgttttgcatgtgtggtttgttttgtcttcaactctttcatagtctctcttcccaaagttttaagctttatagatcaagacagaagttgtgttgctaattggagttaaaatttaacttttaatgccagcagaagccaatgccatgaagttctgtactgaaattcctaagacattcttggccctgctttcctgtcttttgcccatgctgcccagagaagccaccattgaaacttccctgttattacacagctctgacatgacatgtcctcacttccctcactgttaaccagtctttgtcttctgcttgctgcccatgcctccgctgtctctcctcagcctgtgcactttctcgtggtgcctcattttacccggaagcctttgcaagcttgttccccaaatgtcaacatgatgtactgtttcgtgttgagagctttgcctggctgttattagctttctcagcaggatctgccatgggttctccattgaccactcaacctgcatgcttctctgcctctttatcttcaattctcttcccccttatgatgatctctctcactgatatgacatatacataccatttatttatgaataggatgctggttttgtttgtctgcttccctctcttgagccacccgtccagattttgttcagctggccgtagtggtgtatatctttagtcctagcactcgggcggcagaggcaggtagatctaggtcagcctggtctaagattgagttccaagccagccaggactataaggagaaaccctgttttgaaaaaccaaattaaaaaaaaaatttttgtttaaagaagaaaggatgagggctggagagatggctcagcggttaagagcactgactgctcttccagaggtcctgagttcaattccctgcaaccacatggtggctcacaaccatctgtaattggatccaatgcccttgtctgttgtgtctgaagacagctatggtgtactcacatacattcagtaaataagtaaataaataaataaataaataaacgtttttttaaaaaaaaagaaggatgagtctcccataaaacacttgggaggcttagttatcagctaactcaccgcagacttgagaaagtaaaggaagaaaagggacagtggttggattcgcattcctcaccctgtctgcgctccttcggtctgagtctatgatgtaactggcagagtgatgtaagcctcgaaagtaatccatgttacccatttatgagaatatcatgatccttagcatgttaacagctaggaaagctacagtggccttatctattatttatagttttatttattttttatttctatttatttatgtattttttacttcactggatctccaggctctcttttgacaccttactcatcaatatgagaccttcttgacctatagcagagtttgagaaaaaccatattggacggccaggccaggccaggggactgtggacccataaggtgatgggtgactctttcaattacgtctggtggatagccacattgatttatatattgttcaaaaccccagatcttattaccactcttcaaagtatgaggctttaaaaagcggcttctgttctaggtgtttgggaacaagatgatcatcccctccctggatggagacctcttccagtgggaccgggaccgagagagcatggaggccgtccccttcacggtggagtccctgctcgaatcttcctacaagtttggagatgatgttgttctggttggagggaaatctctgactacatacggactcagtgcttacagtggaaaggtgagtgacggtgcagtgggggtggggagcaggcggatggaaggaacagcatgtttagtcagggtctctctgtgtaactggctagcctggagtgtgtcgaccaggctggcctcagactcactgagctccacctacctgcatgcagttgttcctttgtaattatcccctgagaacaaactttgttttaatgaatcaatggtgagggagtaatgggaaacggagtttatttacggtgaaagtaatcatcagagggctagcgcgatggctgagctgccggaggctcacaaccaaaaatacaggaagaaacatcagagtaggacaacaggaggagagagaatttataaatatggtctactgtgctgggtaggtgcttttgtagtgtgttattttgaagtcttcataaggatgatgtattttatacacatttttacaggcaaagaacccttcaaagattagtaataatcctgatgataggaataattggtgcttgtctatctggtttggctataaaattgcccaaggagagagtgccgctcactaaacagtaaggaaatggagacctttaagggattcagaaactccaagtcagatttgcctcagatcaggctgatggtaaagtcattgatggcctagattctctccagcaagactccgggatacagtccagagtcttagtccctggatgtatagacgttttctgtatagatttacactatgaaagggaaggctgggggctggagagatggctcagcggttaagagcattgactgctcttccagaggtcctgagttcaagtcccagcaaccacatggtggctcacaaccatctgtaatgggatctgatgctctcttctggggtagacagctacaatgtactcacatacataaaataaataaatcttttaaaaaaatatttaaaagaaaaagaaagggaaggctgggagcaggacttcttaacctgaaggttcctagttcagtggccctcttccaggagccaggctctccgcagcctggggattaaggattccatgctatccaggatggccattggtgctttgttttgtttgaaattgagctgtcagcctccctttatgttagtattctcctctgtaaaacagcagggctgaccagtcccgcggttctctgcctggatgttctgctacgagaagtctgggatcccagcatgtttctgtcttttctgaggatttcagtttggatccaactaaggaggctctgtttttcttcagtcaaaagacattagggctcagagttttaaagctggatacgtaacgctaggtggggattgtgaggctgagtgttctttcgcctcatcggagctttagtaatgccgtgtctgcagagatacaattggctattcatttcttctttggaattccccatggaattccccaaaatagggctcaaattatataagtccttaaaatcatccattccctgaaataaacattgttggaactttcatggttctaagtaactcattttccggtttaggaatctaaagatgcccataacttaggtatttctttaatttcattttacttttttaaaaattgtgagcccagcatggtgtgtgcctttaatcccagcactagagacagagacaggcaaatctcttgagtttgaggccagcctgatctacaaagggagtttcaagacagccagggcaacacagagaaaccctgtctcaagaaaaaaaacaaattatagagatcgtgtgctggacatactggcacacatttcaatcctagcacctgggaggcagaggcaggtggatctctttgagttcaagaccagctttaactacaaaagtaagttccatgccagccagggctacatagagacagggtgtgggtgggtggggtgtctgcctgcctgcctgtctatgcctatctgtctgctgtctttcttgcttctttgacttattttatgtctgtcttttcagctgaggtatatctgttctgccttgggatgtcgccgatgggatagtgatgaaatggaagaagaggaagacatcttgcttctgcagcgtacgcagaagactgtgcgagctgtcgggcctcgaagcggcagtgagaagtgggtatccgaacatcaggaatggcgttatttagaaattccaaaagctggtcatgcggtgcacacctttagtcccaacagaggcaggtggataaaaagggggatgtgactccattaaacctaggatttcttaaagactttcctttgtacagattctgtgaatccaaagcacaatgtactttttttttttggtttttcgagacagggtttctctgtgtagccctggctgtcctggaactcactttgtagaccaggctggcctcgaactcagaaatccgcctgcctctgcctcccaagtgctgggattaaaggcgtgggccactaccgcccggctacaatgtacttttaagagaaatgaatgcctatgttaatctcaaagatgtgaggagaaagcccacagacccaaatcatcatggctgcattagttacagctagcttttttaaaattcatatacacattctgtctacccataaaggcagggctcaagagatcaacatcgggcacgagggagacaaggtttttatagttctggagtaggggtttccacaaatggggagtttgacaggcaaaattggcagggttataggaacaggatttaaacataacaagttagtcataatgacctgaaacaaagacctgattgcaaggaggtggtccttgctaagagtagggttgcaagatggttataacaacttttgaaacaaagacaagattgccattcctggaactgggagaacaaaaccattagtaattaaggttacaggtagggcatagcccaattcttgcaaagcagagatttaatcataaataggaatgaacctagttagtctttactataagatggttttcaagcctaaaatgggccaaacagcatcacatcgtgtgctgcaaggtgtggtaaccaggagtcccatggagtgaatgtatttttagcttagtccttggtcagtgacatttggcctagtaacatgactgatagaagttacttaatggcaggacacttgagtgtctagtggatgccttggtcgtttgtctcactagccctattttattttatttaccttttcatttttgcagtgctgaggatcaagcccagctctccccacgcgctaggcaatgttccatcactgatctgccgtcccagctcccagcttcagagtagtcacttactctgctatctttaaaagtaccagccattcatttgacctaacaaataatgagccccttatgtaatttaccacttaatatatgattcagctgttagatacgctggtcctctgtcatgtccagactttctcagcttgatatactaagctctgagtcacctgtgtagttaaaaaaaaaatcactttagatcccatcttgatattttgaaactgaaccacttagaaacttttgtcatctgatgaaatagaattgaggcatctgtcctgaaatttgctttcaaacccaattaagaaagtatttccttttttctgtttttgctggcctgtgaatagagatttgtatttgcctgccagagtttatcctactgggattgttaaatctgagagctctgtgggagcacaggtgcagtttagtagatttgtgagttaccagaatccaaagagcaagcgtgggcctctaattctattgagagagagagagagagagagagatctaatctccatattccttaaacataaatatagatgtatatatatcaacatttccaaattcatagctagaccattttataatcttagtgactgtcattatagttaattatgtgtgtgcatttcctgctccctgactatagagaaaacattgctggataagacagacatctaggacagagggaatcatctgtcatatcttggtcaatagagaacaaaaatgggttttgcttaggtgattgaagaagttccattggaatctaaaagtaatgtatacagcttgccttttacactggtttgttggggtgtactttgctgcacttgaatgacatgtgctcaggtaattaagaaattaaggccggctgcaagtcacctcattttaatgtgattttgttgtgttttatgaagtacatgttaatttttgatagaacgtctggccttaggtgtttactgtctacggcctcagaatagctgcttgcaaaggatcagccacggctctctgaggccctcttgtggtgtaaatcagcattgcattccatttcaaaaagttaagatgagctgggcgtggtggtgcactcctttaatcccagcacttgggaggcagaggcaggtggatttctgagttcaaggccagcctggtctacaaagtgagttccaggacagccaggactacacagagaaaccctgtctcaaaaaaaacaaaaaacaaacaaacaaaaaaagctatgatgatgtcttctcacaaaagtgttctattttcttcttcagtctaaaagcagtactgtattatttgcgtgctgtattatttggtcccttcatttaaacgtaagattctaaaacacacctttataaatttaaggtggaatttcagtgttggccactttgaacttcggtatattccagacatggaaactagagccggattcattgaaagcacctttaaaccgggtggaaacaaagaagactctaaaattatttcagatgtggaagaacaagaagccaccatgctggacacagtgataaaagtttccgttgctgattggaaggtcatggcgtttagtaggaagggaggccgcctggaatgggagtaccaggtatccgagaccacagactcagtagctctgtccccaggttttgtttgaccatacacattactagagggaggtaatgccattttggaatctcaggtatttttctctgctttaaaactgtgactttaagagacattttgtggagctggcaagatggtttagtcagtgagtatttgctgtgcaagcctgaggacctgcgttcagatccccatcacaacatgaaaagcgaggcctgaggttccaggtctgttcccagcccagggaaggcatagaaaggcaggtccatgctggtcggccccgtctgaccagtggattcctgtaatcctgtaattcctgtaagagaacctgaatcaaaaattaagatggagaagctagagagataaatggctcagtggctaagaggagctgcagctcttgcagagaacacagacactcacagaaaggagggagagggagggaaggggaaggagggagggagagagaaggcatttacaagcggaaatctgtaaattccgctttcgttgctgactgcttctctcctctgtctagttttgtactcccatcgcgtccgcctggctggtgagggatggcaaggtcatccccatcagcctgtttgatgatacaagttacacagccagcgaagaagccttgggagacgaagaagacattgtagaggctgctcggggagccacagagaacagcgtgtacttaggtgggtagcgttagccaggaaaggcccactgacgcccagcgtgcttcactggcggccctttctacttagtttccgagtactttctttgccttactttcccttaacgtctgtgccttgatttgtattcctgcggtttttccgcttgtccagttctgcaacctgattagtttactgtgttcttttcatctgagacacaagttagaaaggctcagaaatgccctcattctgtggagccgtggttctcagccttcctaatgctgtgacccccggttcctcatgtggcgatcccgaactataaatttgttgttgttgctacttcataatggtaattttgctactgatataaattgtaatgtaaatatctgtgttttctgatcgttgtggcaacccctatggaaggattgttggacccccagggttgagaccctcaggttgagaagcactactctagagactgaaaacctcgtcacatctgtgctgtttgctttcttcctgcaagccacagtttgtttatttcatggcatctttacagctaaactgaaaaaaaacaaagctctcctgtgattctgtactactgagcatatcacataaatacattttgaaatgtttgtatctgtttaggttagcttgggttattgagacaaaattatataaactacatgccacccatacttcaacccagtctccatgaaatgccatgatctgaaggaacgaatgtctttgacaacatgaacaagtcaaatatatcactaaataatcaagtcatggaaataaagagcgccctccttttcgtaaaataaagtaaaacatgagcatgacttgtagcattggccacactgttatcacggccctggcattagagttgtttagataaacttcctttacaggctgttggaagcacagaaagtcttattttttgatgttttggtggaaatggttttgtgttactgaaaaggtgctattattcagttcggggaacattgtagaggctttatatatatatatgtttttcggttttgttgagtcaaatgtaaatgctttgagcatcttccctggaaagagctatgtagcaaaggaataacatttgtctaagtgcattaaatcagagcaaacttttaagaactccatcatgtgactgacatgtttttgaccatgtggttgacccagggatgtacagaggccagctgtacctgcagtcgtccgtcagggtctcagaaaagttccctacaagcccaaaggccttggagtctgtaaatggcgaaaatgcaattattcctctgccgacgatcaaatggaagcccttaatccgtaagtcacttagagactttacaaatactactgaagtgcctactaggtaagtcaggtgtggtagcgtgggcctgcaacttcctagcacttgaatgtggaagcaggaggttcatcgacatagtgagtttgaagtcagtctgggtgacaggagaccctatctcgaaacaaaaaacaaacaaacaaacaaacccagcacctttattccaagcacctgggaggctgaaacagtgggatctctgttagttcatggtcagcctagtctgcacaatgagttccagccaaccagggcacagtaagaccacatctccaagaccaactagcaagcaaagcatttaaaacagaataagccaggccatggtggtgcagaggcaggcagatctctgagttcgaggccagcctggtctacagagcatgttccaggacagccagggctatacagagaaaccctgtctctcaaaacacaaaacaaaacaaaacagaaaaataagtgtatgtaggtaaacaagttacctggtaatcacatatttttgagacaaataaacaaattgaagtactggaccaaatcctttagttttctttctataccttttgcgtgtttttattgtaaatgttatacttgaagggcttcttttaaaattttgtttgagtttaattttatttatgtgggttagagtgatcaaactcaagtttgaagcttcgatgttagatgcctttacccagtgacccaacgtgctgacccttaagcgattctttggatgaatgaccctttctgcatctgttgttttgagatacggtctgactatgttacccatgttcatctccctactcctaagctcaaattgtctgcttcacacagatgtgggtcatcttcctagtgtaggacctgattgcgtctcagtagcaaggatgtctcagtagcaaggctctttgacctgtgttcttgagctgagctgtgggcaaatgtcagctaagtgaatgaatgagcctatgcctttcattgaagtcacgtggttaatagtgtacgttctctttagattctccttctaggactcctgtcttggttgggtctgatgaatttgacaaatgtctaagtaatgataagtattcccacgaagaatacagtaatggtgcactttcaatcctccagtatccatacggtaagtgtcatttgtctcgtgcagttatttgaaattaattaatagaattaagacgaagttaaattggctgggtggtggcagacacacctttaatcctagcactcgggaggcagaggcaggtggatctcagagtttaaggccagcctggtctacagagtgagttctgggagagccagagctacacagagaaaccctgtcttggagtgcggggaacagaactgttgcagttgtgttaacagagaacccctcgtgacgcttgttttctcagataacggttactatctgccatactacaagagagaaaggaataagcggagcacgcagatcacagtcaggttcctggacagcccccactacagcaagaacatccgcaagaaggaccctatcctcctgctgcactggtggaaggagatattcgggacgatcctgctttgcatcgtagccacgaccttcatcgtgcgcaggcttttccatcctcagccccacagggtaagatgctctgtcaacctaatgtgcttccaagtggttgctgtgtaggaaacctctgggagggagagttccggcactcagacttaccagagaatcatctgcgcttgtactgtctccgtcacttagccacagagtcactgtacctgaacagccagtatgacatagcctactgctgccaggttgcagtctcatacagtgtgtgactacaacatagtatttagtatctgtgtatctgaaatagatgaggcacacttaaaaaaaaaaaaaaaaaaaacactagccacaattgttttcaactttattgcaatgttacgggtcggctggagagatggttcagtggttagaggacctgagttcattttgcagcacccacatcagacaacccttacctgcctgtaactccagctactggaaatctgacaccctcttctggcctccataggtgtccacatgtttttggcatagggtcatacacataagtaaaaaataaaatatctttttaatacatttgtgagcacactgttgtggacgtgtgctgtagatgcttgaacggccatgattcaaagcatggctgcatgccatttctaccttcttgtcttcacgtaggccttggtccattgcactctggctttcactcctcacagctcacaagagtgaccttgacaggagctttaggtgacctttggttaaatggagtagacatcttcctgtccccggctctgggtcgacagtgccagttgcttctccttgactttcctatctgccttccttgacccaggccctcccagtctccttggaggttgaatggatccttcaggacttcaccttcctcagctctggcctccactgagacccctcacatgctctgttctcttcagcaccaagagtcttacagagagatttccaaattccaccttcctcctttttgtaagaccagggtcttaccctgtaacccaggttgaccagaactgatggcagactgcctgcctcagcgtcatgggtgctgggattcaaggtttgatcccagatctaaatcctttctctggagcagctttctagttagaactatacaaatggctcaaatgagccgtatctcagactgcgcccattcatcccatccatccccagccggtcccacaggcatttctgtctcagactgaagtgccctgctctcttaccacagccaaagcccttctctccctcaccagtcaccatccgccaaggtcttctttctaattatctgcagttctcatttccttctttatacacacacctgtcatctgattggaggaacatcctataactgggttcatgtccactcctgtccgccagccattctcatccccactccacctgtagacccgaataactgacttgacattcttgttagaattaagtttagctttcgtcagctatgccagggttccgagtggtccatgccctgactgctctgttctcatctgccccacgccttagatcctggagttaggtcctcggcccctgtcaaacacagcctcttcccttgctagtgcagttagtaggaaaggtctcatttctctctgcctgtgacgacattctggaaccagctagctacttgtccagctctccagtcccttacagagaacctggcaggacaagaatcagttaatgagtggacgagccatgattacctccgcccttcactgtgctaatttttagtctcaaccttcctactgctgtgacccttcaatacagttcctcatatagttgcgacccccccaaccataaaattattttcattgctacttcatacctatgattttactactcttatgaatcataaggtaaatatctgatatgagggccatctggtatgtgactcctgtgaaaggtttttggactccacaaagaggttgcagtccaccagtgagaacagctgctctagaaaaccttttagctgtttgtaaagaggcattgccaggtttcattgcatgttggcagaacacttataaaagcgtcttcagggcctggaggatggatggcttagaggttaagaatatagaagaagtgccacagttcagttcccagtaccacagggcatctcatagccatctgtcactgtgtttctaaggaatcagacacgctctctggcctgggtgggcaccttcacacacatatacatatggtgcatacatgtacaagaaggcaaacatgcacgtaaagtaaaaaaaatctttttaaaaagagaaagaaaacaaaatccatttgaggaaggcaatgggacgcaaacctgttgaagtctagaagagggggtcgctgctttgtgcttgtgcttttctttcagtgccatttgctgttcagtgttatctcttgagatgagatgatgagctgacttctgttcgcctccgtcctaacagtaactgctttctgccttctcagcagcggaaggagtctgaaactcagtgccagactgaaagtaaatacgactccgtgagtgccgatgtcagtgacaacagctggaatgacatgaagtactcaggatacgtatcccggtaagagtcttggcgagcgaccgtcgatgcacagacagcttcaggctgtgaagtcagtgaattccgctgtgaactcacatccgattcgtcatccaccaactgagatattagcaaaatgtctaatcccgtgtgagctgtcgctcctcttagaagattggacagagtgcagttggcccttgaactattgagggcttttgcatttggggaggtggattcgttctaaggtccttgactagctatttttaggaattcagatgatcgctcttccctctctgtgaatgtaattggcccagggagggttggcatcaattatgtctccaccttaactgttctctgcccagctgaggcaactactaaattagcgtgagtgtacagtcagagcttaacttcataagagcgacccggcagagcagccgagtctccagcacgcatgcattcattctcacaggtactcaacagacctttgatttgccaagtagtgtccaaattctagaactgtaaagaggaacaaaaatattttgcccacatttatggtccctgtggtgcagtggtgctgagacatatgcgcttcattgtaactgcaaacaaacaaacaaacaaacaaacaggcattccatccgttgtgtggacagtgctgtgggaacattaagacgtgtgtgatcagcagaatgaaggaaggttggatttcattaaaggcaaagcatctgtcccaggagagcgcagggcagaacaagagccctgaactcaagagaggataggatgcacagcgtaggtcaaacccctgccttcccccatgctctcattacagtactcagtatacctagtcagaaaattaggaaatcagctctgccatggggaacgcaaactgcaccctgaactgggcagtcatgagacatgccttcccctctgaacctgacaggagaacaaagcatggtggctcgtgacagtaatccaagctgttgggggccaagagcaggactgccatgaggcaccacgggtgacaggctgcaggtgactaagcttggctgagcaccttccccggtgggcgcactgactctcaggcaaccctacctgtgtcagctttggttcctgctgagagttccagctgtgagtggacttaagtggaataagattgattgtctttgtttagggaaattttaaaagcaatgaaatacagctaaggaacatttttaacagaaaagccaaagaaagcagaacttagagaggggagaagatggtactgtggtagctgacaaagtttgggatagaacaggtcattagtgcagttactgtaagaacaagagattgccagctaacaaagccattcattcatccattcatcagcatgaagtttataacttaatgtgtttgcttgtttatgcacacaggtgaccttagaatactgctagtcaagttctcgctgtgctatctatgcgatacgttctgacagttgtagagtatatgcttttgtgtgtggtgatgtagtactggactgcttttgttcaatatcgaaatgttattgtagcatttcagactttaaaatttcgtatgtattttttaagatatctaacagattttgagccaattcagtgcatgggtcgtggtggctttggcgttgtctttgaagctaaaaacaaagtagatgactgcaattacgctatcaagaggatccggctccccaacaggtaacgggcaatgctttcagtagacttggaaggcatctcattacgcacagtgcccaccttgtgctccgtagtcacagtgtgctttctacttccaactctttggttcgaagcgacctggagactgcgttaaagtgtggtctttgagactggcaagatagattgcttggaggttaaatgcacttgttgcacaagtgtgagttcagatgccaccacccaaataaaaagctgggcatcctacacacacctctgtgtgtgtgtgtgtgtgtgtgtgtgtgtgagtgttccagaactgaggggagaaaaaaatctaaaatacactttttgaaaagatttcagtactaccatatacctgaggctaactcatgtgttcttaattttattttcaaagagacttctaatgtactctttttttttttcaccagtgagcaccaaatacttaatcttattttctatactttatacttcagggagttggcacgggagaaggtaatgcgggaagttaaagccttggctaagctggaacacccaggcattgtgaggtatttcaacgcctggctggaaaccccaccagagaagtggcaagaagagatggatgagatctggctcaaagacgaaaggtaactctgttaggcagacttacagatgagtgtgtcctcctaggctagcactgtgctgtgaacgtggtgccgggtcagggcctgacctgaggaggaaagtgcggccggcacctgtatcttcttgttattctcggacccctggagaagaacttcagatttggtgtaaagcatgctttctctgcctgctttctctgcgtgctttctctgcctgctttctctgcgtgctttctctgtgtgctttctctgcctgctttctctgcatgctttctctgcatgctttctctgcctgctttctctgcgtgctttctctgcctgctttctctgcgtgctttctctgtgtgctttctctgcctgctttctctgtgtgctttctctgcatgctttctctgtgtgctttctctgcctgctttctctgcctgctttctctccatgctttctctgtgtgctttctctgcctgctttctctgtgtgctttctctgcatgctttctctgtgtgctttctctgcctgctttctctccatgctttctctgtgtgctttctctgtgtgctttctctgcatgctttctctgtgtgctttctctgcctgctttctctccatgctttctctgcctgctttctctgcatgctttctctgcgtgctttctctgcgtgctttctctgtgtgctttctctgtgtgctttctctgcatgctttctctccatgctttctctgcgtgctttctctgcctgctttctctgtgtgctttctctgcgtgctttctctccatgctttctctgcctgctttctctacatgctttctctgtgtgctttctctgcctgctttctctgcatgctttctctgtgtgctttctctgcatgccttttcttcatatgaataatactcaggggatccacactggcttttctcagggtgatgtgtttctgtaatactgtatccgttcttttttctcttttatgggtttttctcttggcagttaataatttataactgtgttgtaaatggttctaggctatttcaagctcgttcgtttgtttttttgagagtttttcctgtatagccttggctgtcctagaattcactctgtaggctaggctgacctcaaactcagatctgcctgcctctgtttctggtgggattaaaaggtgtgcaccaccactgcctggctgtctatttcagtttttaaaagtatatatactggggtctggagaaatggattagtggttaagagcactgactgctcttccgaaggtcctgagctcaggtcccagcaaccacatggtggctcacaaccatctgtaatgggatctgacgccctcttctggtgtgtctgaagtcagctacagtgtacttacatataataataaatcttaaaaaaaaagtatatatacttaggtaacctgcagatatcaccaacctagcacccctgcggtgttacctgtgcgtgatgtgctataggagggaagcccccagaaaccaccatgaagaatagtgaagcaacatgcctgcagagcgttcagtcctggaggtgtcttgctaaggaacacctattacagacgccaggacaaaggggagtggcctctcgcatcaaggcctgtgagctacgttaatttgcttcagaactggggctgtccagaagccctgtcattagcatcgctttcctaatttacattttgtacgaaaggctacacagatgactgtgtacatatttcaggtatataattaagctcctagggctagagagatggctcagtggttaagaggacttgttgctcttgcagaggacttgggctcatttcctggcacccatgtcaggaagctcacaactgcctgtaactccagtaccagggactccaatacccccttctagcttctacagccgctgcacacatgaggtgcacatgcagacaagaaggcatacacttatatacacaaatttgaaacaaaattaagctttcaaataaaaattttgaaaaggaatagatagggtaagatgttctttgtcgcacatgatgtgttttattcccactgcgtgttttcggtaattgtgtttataataattgaaacattttaaaccactgtgcaggtcacatgactgacatacattcactcagctcttttcgtttctcccccttttagcacagactggccgctcagctcccctagcccgatggatgccccatctgttaagatccgaaggatggatcctttctctacaaaagagcagatcgaagtcatagctccttctcctgaaagaagtcggtctttctcggtgggcatttcctgtggccagacaagctcatcggagagccagttctctcccctggagttctcagggacagactgcggagacaacagtgactcagcggacgcagcctacaacctccaggacagttgcctgacggactgcgaggacgtggaagatggcaccgtggacggcaatgacgagggacactcctttgaactttgtccgtccgaagcttctccctatacccggtcaagggaaggaacgtcctcctccatagtgtttgaggactctggctgcggcaacgcgtccagtaaggaggagcccagagggaaccggctgcatgatggcaaccattatgttaataagctaactgatctcaagtgctccagcagcaggtcttcttcagaagccaccaccttgtctacctcccctaccaggccaaccactctaagcttggatttcaccaagaacactgtgggccagctccagcccagctcccccaaggtgtatctgtacattcagatgcagctgtgcaggaaggagaacctcaaagactggatgaaccggcgctgcagcttggaggaccgggagcacggcgtgtgcctgcacatcttcctgcagatcgcagaggcagtggagttcctgcacagcaagggactcatgcacagggacctcaaggtctgtagccagaggcggccacgccgggctttgggtgtgccctggggttcagagcagaggtcggggaaggaagcagggaaggaagaagtctcatatgtgaaaggctcaggcagactgtgcatcttcctttacggcctgtttatttttgttttactgtaaacactgtttccagcagtcccgatgggggggaagatctcatatctaaattccagcatgagcagatataccacataattcctatgctttaaaaataaatttacatcgctgggcagtcatggcccgtgcctttaatcccagcactctggaggtaggggcaagtggatctcttgagtttgaggccagccagagttgcacagagaaaccctgtctcaaaaatgtgcgcgagtgcgtgtgcgtgtgcgtgtgcgtgtgtgtgtgtgtgtgtgtgtgtgtgtaggtcaaaggataacttttaagtgccatttccctttcaccatgtgggtcccagggatagaactcaggttgtcaggcttggcagcaagcacctttatccactaggccatcttggataagccatcttggacctctgactatttttttgtctttgaataaccttgaccagggtctctgcatcgcagagtgagagggatctgagtggaaggggagacgagccttctcgctagccagctcggatttggagcagcagagcccgtgttttttccccattgctgactgtgtgggccttgagaagccaattagagaaaagtggcaaatgcttaattaagtggccaaagctgtgcaaattaaaccctgatctcagagtgtacagtactgaacagagcagcaatacagtgtgctaaattgcatacagttctaactcaggctactacactctgcaatcaaagcactaaagaggctgagacaggaggattgctatgagttcaaggccatcctgtcccagtaatacataaatacatacacaatgtttccatagtatagacttctaaaatgtgcagaactgtagctagtttgttggttctattaaacttttatttgactgtttcttgtcatgacccacatacacctggtagccctcagtaggtatgtatggaacccataaatatttcctgagggaagtgacctaaacacttggcatatttgaccttgcgttaaatattttaaattttattttgatataataacaaacttgcttccaatacttaagtagctataacaggagttgttttctgggctgagagtgtctctccagtagtagagtgcttgcctagcatgcagtgaggccccgagattgagccccacagtcggtctctggccacatagcaagtttccagctagcctagctacatgagaccattatctatcttcaaaacaaacaaaaagttgctttcttctaaaatcatcaacaaaatgtttttaaattttttaatgtgttttaagaatttggggagaaaatgggactaagaatcagggagaacccctgtgctcctacacacccaccacttgtcctaagcagtcgttgtgcttcagtaagtttgatgtgggtccaagctgggtgccgtggacggatccacacacagtggaagttgagaggtgtttcctttggttggactggagaaggtgacttacagcagagaccttcaggttcagattggtgatccgagctgttgaggtgtgaatgcggtcaacttcctcacgcatgtacaagttccccatagcctactccctgtcctgcagaagcagcgtcatgaaactcaaggccaatgacttcattaacagtcataatatgctggttttataatgtgagcaagatgttggcaaaggtttgctcaacattactctgttgtataaagaacttttcctatttgtatgtgcaccagaagaattcccaaaagaaagttaattttccctttagtttttctaaaaatataaagaggtttattcctttgaaaaggcagccatttcaaaatattaacaccaccacgaatctttcccctcgctgaaaagcctgtatcttgccatgttctgacccaggatgccatgttaaaccttgtcagctttcctccttataaagcttggtcacatgtctgtcatcagcaccactcatgccgcctctccaggaattctgttttcctttgggcttttctcagagaacccgattctcagcacacctaggtcatttatcctctgatttctgtggtggtccaaaccatgcgcgcccaccttgttccccgatcccagcctcaaagcagtgccgggcatgttttggacctttggctcattttagtttggattttcttttgcttgcaaccaccagcattagtactgacaaagtccgcagaagctctgtccaccatgcgacaaaacaatcaggcattcagtacagcgtcagctagaatcagacaatttggtgagcatgcgttctcttcttcctgtttattctttgcacttacaaccaggttctcctgtcacagactcaaggtggcagctaatggttcccggacatgtttgtcttttaagctttctgtaaggcttttggtagtacatggtaaaaaactttttttttctttcccctgaggtggccagaaatcctaaggcttgttttcagtaaaccaaggtccctagaccatccctccactggactccttgaaaggaagcggatccggcaagggtgggattgctccatactgagacccaagggaattcacaaagtctggatgcttctagaagaagcactggaaatagatgctaaagagacaaatactgtctttaagagttctataattgccattggaaaatgggaggggacactagggtcgcagcttggttggtagaatgcttgtcttgcaggcaggaagccatgtgtgatttaaagtcatcttcagctacatagtgaggttgagatccgcctggactacttgagactcaagagaacagagacagagttccaacgcaaataccgctttgtgtaactcttacatgtaggcataagaccttgggttggatctgtggcctgacagtgggaaggagaagagaaagaaaggtactgtcatttattgtctctgatatggggccatcgctgagaaagttctagattattaccacagattttagttgccttattgcttcaaagtcagaattgnnnnnnnnnnnnnnnnnnnntttaacccgaggaccagcttaatctaccaatctcctaaaccacctcccgtgtggcctgaagagcacctggagcctccctctgcttaagaataagccatttttagagctctcagaccaaatcccagcacggagttaacatagactgctcctgtgaggggctttatgaagtcagcctcagggaaggtggcggtgcagcctgacctctgcaggccactgggttcagggcagtcctaacaacctggtctcctagatcagtgctctcggccttcctaatgctatgaccctttaacatacagttccccatgctgtggcgacccccatccataaggttattttgttgctacttcataactttaattatgctacagttatgaatcataatgtaaattcctgtgttttctaatgatcttagtcaacccctgtgaaaactgtttaggtctaaaggcgttgcgagccattgatattttctaacacagcctaaaacacacacacacacacacacatacacacacacacacacacacacacacacacacacacacacacgataatagctcagccattctctatggctgccgtgggacttctgggaaagctgtctaatcagatgtgcttcacacactaaaacagttatgcagaagtttggctgcagctgagggtgtagataaaggccatttatgcctacctaccacttgaagagagccctgtgttccagctcctttactgaagggggtggggggagggcagagagagagagaatatatgtgtgtgtattcatgtgcacacgtgtactcagtgcttttaacacaaaaccatttttatgtttcagcatatgatggttcaagacatgctctctccatcccccacggagcggcctgaagccacagacatcattgaaaatgccatatttgagaacttggagtttcccgggaaaacggttctgagacagcggtcccgctccatgagttcatctggaacaaaacattccagacagcccagctgctcgtacagcccactgcctggcaactagccctcagctgccctcgaaggtggcagagcaggcaccctgaggaacatggctctccacagcggtggactcagattttatgctttgatcagttggactcgggaccaatttttctaagtcagactggatcacgggcctaacccagtttgatcttaactgaacttcaaggaaagggctgtgtaaaggacacatgaacttgttgcttgtcggtgtcccaagactagctggtcagcttagaaccttcacttttcaccaggcggtagaagagatcctcaaatggtctgaactggaaatgtctttaaagcacaaaagtgtaaaagaccctctcacatgggaactacatgttctagaaacgtgctttctagagatacaagggtgattttggaagtggttgttataaagctgacttcatttttttccctggtgagccgtgacccatctgcactaatttgcaaggcacatagcacaagctgggtcgccatttatgtcggtagtgtcatagtctgcagcagtgaatagcgtcattcttcaggtggtctagggagcgcgaagagcttttttgtactttttacctccaataatgggaaaatgaagcttttaggtattggtcaaaagatctgatttgagagttttgggttttttttttaagtgcagtaggaaatggattatctattacaactaacttcttcaattatggaatttttatcctagtagaattctgtcttaaatgtaatactacaagtgggtacattcccccaaactgattatagataagtttaatcatctcaacttgctaacatgttttcatttttcctgtaaatacgtttattttttatttataaaaattctgaaatcaatccatttgggttggtggtgtacagaacgcacgtaagtgtgataactattatgacttctttcaagtctaaatgatttaataaaaaaattttaaatt

SEQ ID NO: 137 - DNA, 4154 bp, Mus musculus
cgatgtctgcacaaggctgtcactcaggtggcagtggctgagacgtggccgggcagctctgctgctgcggcgcgaagtcgagaggcggcggggtccgtggcgcgcgctcgcagtgctccgaggctccgagcggcgagacgggcgggcgccgacggcagggtctccatgcccgcgcgtggggcgggccgctgatggagcgcgccacccggcccgggccgcgcgcgctgctgctgcttctgttcctgctgctgggctgcgcggcggggatctcggcggtcgcgcccgcccgcagtttgcttgctcccgcgtcggagacagtgtttggcttaggggcagcggccgccccgacttcggccgcgcgggtgcctgcggtggcaacggccgaagtgaccgtggaggacgccgaggcattgccggctgccgctggcgaaccggagtcacgcgcgacggagcccgatgacgacgtggaactgcggcctcgcggcaggtccttggtaatcatcagcactttagatggacgaatcgctgcactggatgccgagaatgatgggaaaaagcagtgggatttggacgtggggtctggttccttggtttcatctagcctcagcaagccagaggtgtttgggaacaagatgatcatcccctccctggatggagacctcttccagtgggaccgggaccgagagagcatggaggccgtccccttcacggtggagtccctgctcgaatcttcctacaagtttggagatgatgttgttctggttggagggaaatctctgactacatacggactcagtgcttacagtggaaagctgaggtatatctgttctgccttgggatgtcgccgatgggatagtgatgaaatggaagaagaggaagacatcttgcttctgcagcgtacgcagaagactgtgcgagctgtcgggcctcgaagcggcagtgagaagtggaatttcagtgttggccactttgaacttcggtatattccagacatggaaactagagccggattcattgaaagcacctttaaaccgggtggaaacaaagaagactctaaaattatttcagatgtggaagaacaagaagccaccatgctggacacagtgataaaagtttccgttgctgattggaaggtcatggcgtttagtaggaagggaggccgcctggaatgggagtaccagttttgtactcccatcgcgtccgcctggctggtgagggatggcaaggtcatccccatcagcctgtttgatgatacaagttacacagccagcgaagaagccttgggagacgaagaagacattgtagaggctgctcggggagccacagagaacagcgtgtacttagggatgtacagaggccagctgtacctgcagtcgtccgtcagggtctcagaaaagttccctacaagcccaaaggccttggagtctgtaaatggcgaaaatgcaattattcctctgccgacgatcaaatggaagcccttaatccattctccttctaggactcctgtcttggttgggtctgatgaatttgacaaatgtctaagtaatgataagtattcccacgaagaatacagtaatggtgcactttcaatcctccagtatccatacgataacggttactatctgccatactacaagagagaaaggaataagcggagcacgcagatcacagtcaggttcctggacagcccccactacagcaagaacatccgcaagaaggaccctatcctcctgctgcactggtggaaggagatattcgggacgatcctgctttgcatcgtagccacgaccttcatcgtgcgcaggcttttccatcctcagccccacaggcagcggaaggagtctgaaactcagtgccagactgaaagtaaatacgactccgtgagtgccgatgtcagtgacaacagctggaatgacatgaagtactcaggatacgtatcccgatatctaacagattttgagccaattcagtgcatgggtcgtggtggctttggcgttgtctttgaagctaaaaacaaagtagatgactgcaattacgctatcaagaggatccggctccccaacagggagttggcacgggagaaggtaatgcgggaagttaaagccttggctaagctggaacacccaggcattgtgaggtatttcaacgcctggctggaaaccccaccagagaagtggcaagaagagatggatgagatctggctcaaagacgaaagcacagactggccgctcagctcccctagcccgatggatgccccatctgttaagatccgaaggatggatcctttctctacaaaagagcagatcgaagtcatagctccttctcctgaaagaagtcggtctttctcggtgggcatttcctgtggccagacaagctcatcggagagccagttctctcccctggagttctcagggacagactgcggagacaacagtgactcagcggacgcagcctacaacctccaggacagttgcctgacggactgcgaggacgtggaagatggcaccgtggacggcaatgacgagggacactcctttgaactttgtccgtccgaagcttctccctatacccggtcaagggaaggaacgtcctcctccatagtgtttgaggactctggctgcggcaacgcgtccagtaaggaggagcccagagggaaccggctgcatgatggcaaccattatgttaataagctaactgatctcaagtgctccagcagcaggtcttcttcagaagccaccaccttgtctacctcccctaccaggccaaccactctaagcttggatttcaccaagaacactgtgggccagctccagcccagctcccccaaggtgtatctgtacattcagatgcagctgtgcaggaaggagaacctcaaagactggatgaaccggcgctgcagcttggaggaccgggagcacggcgtgtgcctgcacatcttcctgcagatcgcagaggcagtggagttcctgcacagcaagggactcatgcacagggacctcaagagcatatgatggttcaagacatgctctctccatcccccacggagcggcctgaagccacagacatcattgaaaatgccatatttgagaacttggagtttcccgggaaaacggttctgagacagcggtcccgctccatgagttcatctggaacaaaacattccagacagcccagctgctcgtacagcccactgcctggcaactagccctcagctgccctcgaaggtggcagagcaggcaccctgaggaacatggctctccacagcggtggactcagattttatgctttgatcagttggactcgggaccaatttttctaagtcagactggatcacgggcctaacccagtttgatcttaactgaacttcaaggaaagggctgtgtaaaggacacatgaacttgttgcttgtcggtgtcccaagactagctggtcagcttagaaccttcacttttcaccaggcggtagaagagatcctcaaatggtctgaactggaaatgtctttaaagcacaaaagtgtaaaagaccctctcacatgggaactacatgttctagaaacgtgctttctagagatacaagggtgattttggaagtggttgttataaagctgacttcatttttttccctggtgagccgtgacccatctgcactaatttgcaaggcacatagcacaagctgggtcgccatttatgtcggtagtgtcatagtctgcagcagtgaatagcgtcattcttcaggtggtctagggagcgcgaagagcttttttgtactttttacctccaataatgggaaaatgaagcttttaggtattggtcaaaagatctgatttgagagttttgggttttttttttaagtgcagtaggaaatggattatctattacaactaacttcttcaattatggaatttttatcctagtagaattctgtcttaaatgtaatactacaagtgggtacattcccccaaactgattatagataagtttaatcatctcaacttgctaacatgttttcatttttcctgtaaatacgtttattttttatttataaaaattctgaaatcaatccatttgggttggtggtgtacagaacgcacgtaagtgtgataactattatgacttctttcaagtctaaatgatttaataaaaaaattttaaatt

SEQ ID NO: 138 - protein, 927 aa, Mus musculus
MERAWGPRALLLLLFLLLGCAAGISAVAPARSLLAPASETVFGLGAAAAPTSAARVPAVATAEVTVEDAEALPAAAGEPESRATEPDDDVELRPRGRSLVIISTLDGRIAALDAENDGKKQWDLDVGSGSLVSSSLSKPEVFGNKMIIPSLDGDLFQWDRDRESMEAVPFTVESLLESSYKFGDDVVLVGGKSLTTYGLSAYSGKLRYICSALGCRRWDSDEMEEEEDILLLQRTQKTVRAVGPRSGSEKWNFSVGHFELRYIPDMRAGFIESTFKPGGNKEDSKIISDVEEQEATMLDTVIKVSVADWKVMAFSRKGGRLEWEYQFCTPIASAWLVRDGKVIPISLFDDTSYTASEEALGDEEDIVEARATENSVYLGMYRGQLYLQSSVRVSEKFPTSPKALESVNGENAIIPLPTIKWKPLIHSPSRTPVLVGSDEFDKCLSNDKYSHEEYSNGALSILQYPYDNGYYLPYYKRERNKRSTQITVRFLDSPHYSKNIRKKDPILLLHWWKEIFGTILLCIVATTFIVRRLFHPQPHRQRKESETQCQTESKYDSVSADVSDNSWNDMKYSGYVSRYLTDFEPIQCMGRGGFGVVFEAKNKVDDCNYAIKRIRLPNRELAREKVMREVKAKLEHPGIVRYFNAWLETPPEKWQEEMDEIWLKDESTDWPLSSPSPMDAPSVKIRRMDPFSTKEQIEVIAPSPERSRSFSVGISCGQTSSSESQFSPLEFSGTDCGDNSDSADAAYNLQDSCLTDCEDVEDGTVDGNDEGHSFELCPSEDYTRSREGTSSSIVFEDSGCGNASSKEEPRGNRLHDGNHYVNKLTDLKCSSSRSSSEATTLSTSPWTTLSLDFTKNTVGQLQPSSPKVYLYIQMQLCRKENLKDWMNRRCSLEDREHGVCLHIFLQIAEAVEFLHSKGLMHRDLKSI

SEQ ID NO: 139 - DNA, 90641 bp, Homo sapiens
  misc_feature (1)...(90641): n = A,T,C or G
ataattacattatatttttaaaaaatcatccaaataaaaacataagaaatttgaaatcttattctatacttgctgaccattaggaatatgctgatgtccaccatatgaaataatttcatctattgttagtgatacaaagtgatacttcgcatttgtgcttactattgccacctggttgtttagattgttctgattataaaattgtgtaaacattctctacagagaaaagaggcagaacattatagaaaatggaaatgaagtgactaaagacagcccttggtgtaagtgcccattgagaacactggaagaaactgacttcagagtccacccggtacaaatggccgctgagagtccctggtataagtaaccaaggcagtgcctggtccaagatgccacctaaaacactgtgagacttagagaggagaagcagattctttcagagcacacggcgagttacttggcagttccagggtcagtgctatgctctacattgcctctatttcttcctgaatttgaagaattacaaacaactggaaaaataaaattactccctctcttccccctagacagaaaatgaaagtaatgaagactttgggtaagaattttacagcggcattttcaaagctttgcaaggggctttgtgcatttaagagaatttgctatttagaggtccagagatctggctcctggagtttggttatgaagaaggaagaggcaagtttgaagaaaaggcactgatatttctcagtacaatgtgaagtcctgaaatcattatgaaatagaattctttgcaatttataaagcagttaggaaaatcctcttgtttgtacttaagagttcacatgtacacatgctcatgtatataagtgtgcacaggcacatgtgttagcatttgtttctgcatttatgcatacatgcttgcaaatcccccttttggagcactcaccaaaaggaacagaatggatcatccatattggcccaggactggaccagactatataaattcaagggtttataattatcaattactgtccttgtgaagcaccaaggcatttctctagacttagttactcagacaggagagaaatactcatgacgggtatggctgactgaatgtatggtcacaatgcttctctcccctgtggcagcatacacatccacactctagctgtgacctcatggtatgtggagtgtgctttccaatccctgcactttgaacttggccatgtgacatactttggctacagagcttttcatagacataggaaggcagagacttgaaatacatatgtgtggcaggccttgccctcttgtatttctattattgccatgagaagaacatgctccaggtagaccattcttccaaggaggatgagagaccagtggagtagacctgggtccagcttagtttggagccaagccccaaatgacatgcagacttatgaagatgaatacattactattgttaaacaaatagtattacaaattattgttaaagttttagggtagtttgttataaagattattgtgacaatagctgacaaatacaatgggggaggcagtgagtcctgggctgagaccaatttctgtgggtaagaaggtgaaaagaagtgaaagtaaatgtatccaagacagaagaatagaggacagaaagccgggttaggaatagaagcatgcatgcgaggggacccccaagggcagcattaattttgggagttcctgctttaattagcccatcctttcagcaaagtttgatctgcacatgcagtcttgtgtggtgggtatagaaaataaagtttggttggaagctgtgggtgaagagcagcctcctacttaggggctgtgtctaggagttctgtgcagtgactacagtgaagtggtcatgacccacagtcaagttgcaaacatctgagatgagtttgctatggccaggaagaattttctagtacatcgtaaaggagaaattaaaggcctctgaattggtgggggattgctgggagtgataatggactctcaagtagcacttcaatgtaaagaattactgatataaactatgcacatgtaaataaattataggcatatagaaaaattatgaatttcacaaaatccacaatttatcaaacatattaagtccaaagtgccatgttcctccacttttagtatacgtaagagtctcctagagtgtttgttaaaactgcagattcctggaccccattccctgaacttttgattaagtcagtccagggccacactttaagaaacatcgataagctgcttccttgctatggttacaacaaccccttgtctttcatgtaggaatttggatatttcaggcccattttacacatgatccaactataattgtccttttaaatgttgaaatagccaccagaagaccaggcgtgttgctatgtgctctgcattttttaagcagaacctcctgaattcctctttccatccttgttattcaaacaacttctagtgcttaaagtgcaccccaaaactccttattgatgtgtcgtatgtcacatcaaagcaagctacatttaattttttgtgtttgtcttgtcacttcattggttaaaatctttgaaatttcagtttttaaacaaacaaaatctgttttcacatccttctgccttttttggggcaaagtggaggagaaaaatctgtattgctttttgtttaagtcaggtctattaatatatgatttatatacagtaaaattcacccttcttacgtatacacttctataagtttgacaaacttatatactgacatcaccaccaccaccaataagatttgggatctttccgtcacctaagaaaggttccttgtgtccttcgttagtcaatctcatctcctttgtcactatggttttatcttttgcagatgtcaatacatggaatcataaagtatataatattctgtatctggcttcttttacttggttcaacacttttgaaatgcacccttgtcattcatatcatcagtaggttgtccctttttactgctgagtagtattccagcatatgaatgcactataatttgtttacccgttaactagtggagagacattatgacatttccagtttggagcaattatgtaaaaaagcttctataaacatttgcctacaggcctttttacaaatatacgtttttatctcttaagtaaaaacttaggagtgggattgttgagtcatatggtgtattagtccgttttcacactcctgcaaagatactacctgagggcagggcacagtggctcacatctgtaatcccagcactttgggaggccaaggcgggtgcatcacttgaggtcaggagttcaacaccagcctggccaacatggcgaaaccccatctctactacaaatacaaaaattagctgagtgtggtggcacacatctataatcccagctacttgggaggctgaggcaagagaatcacttgaacctgggaggtggaggttgcagttagccgagatcatgccactgcaactccaacctgggagataaggcgagactctgtctcaaaaaaataaaaataaaaaaatactacctgagataggtaattgataaaggaaagaggtttaattgactcacagtcccacattgctagggaggcctcgggagacttacattcatggtggaagtcaaatgagaagcaaacaccttcttcacaaggtggcaggagagagaaagcacaaggaagtgccacactttaaaatcatcagctcttgtgatcactatcacaagaacagcatggggggatcatccccatgatttaatcgcctcccaacaggtccttctctcaatatgtggggattacaatttgaaatgagatttgggtggggacacagagccaaaccatgtcatatggtaagtgtatgtttaactgtaatagaaattgccaagctgtttccaagatagttgtaccattttaccttcagaccagcaatgtgtgaggaattgctcatatattcttgccagcacttgatattgtatttataaaaatagctattctaatatatatggagtagtatctcattatgtacaatcagttatagcagtcgctgagactagcatgagcggctgtgaaggcaaagtggaacgactgacaaggtaaggtcaagaacagataaaaatgatagagctgtctcgtcagagtcgagagacacaactaagtgggctcgagtagctagcagttaaatgtaagtcggagcagagtatgggacgcagagacggagaaggtgccggaggaagcgacaatgggtgcgcacatctgagagacgagacacgcgcacggcacacacgatagacgatgcacgtagtgcttgaaatgggagaggagcagtacagcannnnnnnnnnnnnnnnnnnnnnnnnnnnnnnnnnnnnnnnnnnnnnnnnnnnaggcaggggaatagcttgaacccgggagatggaagttgcagtgagccaagattgcaccattgcactccagccggggcaacaagagcgaaactccatctcaaaaaaaaaaaaaaaaaaaaggaaaatctgcagattcctggaccccattccttgaacttctgatgaagtcagtccagggccacactttaagaaacattgatgagctaattccttgctacagttacattttagttccatgccctctgtcacatgactttgcagtttctttcactagaggcagggcatgttgtcctgcctctttgatgttaggcctagtcatatgccttgctttagtccatcctgctccaataataagtgctccagttctgatactagttttaagaggccatgtaagtttccacccatcttaattgtgtttcttccattgccataagaaaatcgtgctctagctagatcaggcaactccaggtgaagggtgtcagagtatacatttttgctgtttaaagccactgaattttgggatggttgcttacacagcattgctatgccaatagctaactggtacaacacaacaaatttcactgtgtggcaaactcttcaagagtgcctacccataaacatttctctctttataaacacttttaatagacattttacaaaagatgatatataatgtccaacaagcacattaaaagatgttcaaaatcactagtcgtcagggatatgcaaaccaaagctacaatgaaatggcatcacatacctactagaatagttagaattaaaaagacaattaccaaatgttggtgaggatatagaacaacttgaactctcgtgcaccactggtgggggtataaaatggtacatcactttgtgaaaatgcttggcagattcttataaagttaaacatccatctactatatgagcgagttattccacatctaggtatttacccaagagaaataaaaacctacatctacaaaaagacctgtacgtacataaatgttctcatagtagctttatgtgtaatcgccaaaaattgaaaatataccaaatgtactccaacaagtaaatggataaagaaacgtggaacatataaagcagagtactactcagcagtaaaaaggaactaagtattgctacattcaacaacatgaataaatttaaaaacattatatggagtgaaaaaagtaagacacaaaagtacatactgtatgactgcatttattaaagatgctagaatatgcagactaatctattgtgatggaaaacagatcagcggttacctaggggcctcgtgtaggagggattgaccacaaagggacacaaagaatctcttggagtgatgggaatgttctgtatcttgactgtggtatatacatctgtcaaaactcatccaaatgtatatttccaataggttcagtttattgtacatgtattatacttcaagaaaactgattacacattcttcctttcatcctcactagcagaatcctcattttgcttagcagcagcatggtctggcctgggaaatgtcagtgaaaattccttggtggtgcttcctggagagctctttgataggggcaaattcaggtggttacatgccttttgtcattcctctttgtcctacctataataaagaaatgatactggagttgccatcccaaaacagtgagacgacaggcaaaaggaacaaagtcacccatgaagcatggagaaacagaaggagcataagtttaaataaaacatcactgtagagctgtggtgtcagtaaaaaaaaaaaacccacttcttgcttcacccactatatggcaaggtttttgttattcacaatcaaatatcatttcaacagatgcagtctctctctgttaagggattgaactcactgtttctaaatctcagacctattttgctgattttttgggccacactcagttgtagaatcttggttgttttgggcaaccctggctcagggtacctgagcaccagcttcttttcctggcccagcctcacgggccagctctcatgcccggtccccactttcttacatttccctgaggcacccaggttccagagttcccacaaagtcactgtgaagctccatgctgtcctaaagcaggtagactctcttttctctccttaatttattttcccagtcagcacacttcgactcaggctttttttccaaaatggaaaatttgtgttttgttcccaagtataaagcttgactctccttactggcattttccaccactgtgctcttctgcccgcgcctttttcatcatagcacttatctcagttttaataatatatgtgtgattgttaatgtctgtctccctaactagataggtgttaaccttcagaagggcgggaaccacatctattttgttcatatctttattctcattatttgcaggtggtcatgtggaatccctgaatgttaaatgaataaataaaacttccacagtatttacaggtggcaagtagactcctaattcattagttcagattaatagccttgttcatgccatgatcattttttgaaaaaattacaaaaccatgaagaccaggcccactaaaatatatacactaatttcaaacaggtagttaacaatcatttttcatcttatgttaattttctgacaccttcctcataccaactagtataatcccttttaggtgggcaattttatctcctattttgttgagtagataatggtcaattggtttgagttcgctcatctattttctctacttttcaaaataacttactctctaggaatacctcctacgctctactttcaacatggacggcagagctgccccttttcctccagatactctggaatcttgctctcgtaatcaaccccctctgtctacagcaactgcagtctcttcctttccagttgtctctttccttctgtcctcaggtattcattcattcattcattcattcaacaaacatttattaaatgcttgctaaacactttgcactgttttatgtcttcgaatacatcaatgagcaaatcttcacagaatttacatgcaagtggaaggaaacacagcagacaataaacaaaacaaatatgtaaattacagtatttacatatttgtaatgtatgtatcggctaagcagaaataaagcaggagagaaataaaggaaggaaggtggtggaggttttaattttaaataaggtagtgaggagggacttcactgggattagcaaagcctcaaataaagtgagggaacatatcttgtgggtacctgggtattatgtgctaaattgtgtccctccaaaatttacatgttgaagtcccaacctttagtgcttcagaatataactatactgtatttggagataagatctttaaagcagtgattaagttaaaatgaggctgttaaaggtagccccacactccaatctgactggtgttagaagaataggaagagacatcagagggaagaggaagtaagagggctgtcatcggcaagccaaggagagaggcctcagaatcccaccttgatcttggacttctagcctccagaacttcgagaaaataaactagttttgttcaggccacctggtctgtggtatttgttagggcaactctagcaaactcatatacctgggaagtttcctaggcaggcaaaacaacaaaggaaaacccccaaggtgggtcttgattggcccagtggagtgagcaaagacagtatgaaatgagatcagaaaagccataggaaccagatgctgtagcaccctgtagtctattttaaggacttgacttttatcctgagtgaactgggggaccttttgagggttacgaccagcactatggagaagcaagaagaccggtgaaaggtgttctagacaggaaaaacttgagttgctggatcaaatacagctgataaaacaaagattatcctttgaatacagcactggtggcctcagcgagagcagttttggtggtgtgaatgcctgactgtagtgtacttgggaatgggagaagaggaattgaagataaggaattttgaacacttgagttttgccatacagaggagcaaagacacgtggtaggagctggaaggggaagagaggtttcttgtttgttttgggctggggagagattagagcatgtttttagcagatgaaggataatctaggtatacccatattgccaacaccttaacaaatcttcaccggttttggaccaggtgcggtggctaatgcccgtaaattgcagcactttgggaggctgaggcgggaggatggcttgaggccaggaatttgagaccaacctgggcaacacagaaaccccatctttacaaaacaaaattaaaaattggcctggcatggtggcacgcatctgtagtcccagctactccggaagctgaggaaggaagatcgcttgaacgcaggaattcaaggttatagagaactatggtcaagccactgcactccagcctgggcaaaagagcaagaccctctctctaaaaaaaaaattttttttaatgttcactggttttgatgcgggtaatagcctcccggccagtctcctcctcgttgatgctgtcactgctgaagatgcattttcttatcacttcactcatctgctcaaaaatcttcaggaagtcttgacttgcagcattaaaagttcaaatgccttggctgaacattccagtcttctccactctgcccttttgcaatttcatcactgtctttggtgaggtacaaagcgtgccaggtcagagtcagaagacatgaattaaagtcatgattctgtgaccaaccagctacgtgatcttaggctaactacgtcagtgcactgggccggggctccttcccgttcctaaggaggcgggaggcgtgtcgggcagactggattgtcacaggtcactgccatctctaacaagcggacttctgagccccgttgcggccacaagtaggaccatctcctgcatcctccttacccttctacttctagggaccacacggcttctgtggccacttcttgctgcttcgcttttgccttcctaagtagactaggctttagaagagctacaataccagctcctttaaggtcgacctcctcccggtcacaaggcacttgcctcccactcttcacttgggacagtcctcttcacagtcagaatccgccacgtagtaagtgccgcttccaaccaatcaagaggcagttagcgcagacctttgagggacatccacttccaccaatgatcttcaagtcttctccagcgcctcgctttgtggggcgaggccaaccaccgcgatggccaatctgttgtaggaaaggtattccgggaactgatgagcgcaccaatcaggtaaaaagacgtcggggaagggcatttctcattggtaattgcgtccggaagagggacgggcctcgaacgacgaaattacgatttgattggtaggtgcgatgttgaccaccagggtaaagtccaccttccccaacaaggccagcctgggaacatggagtggcagcggccgcagccaatgagagagcaaacgcgcggaaagtttgctcaatgggcgatgtccgagataggctgtcactcaggtggtagcggcagaggccgggctgagacgtggccaggggaacacggctggctgtccaggccgtcggggcggcagtagggtccctagcacgtccttgccttcttgggagctccaagcggcgggagaggcaggcgtcagtggctgcgcctccatgcctgcgcgcggggcgggacgctgatggagcgcgccatcagcccggggctgctggtacgggcgctgctgctgctgctgctgctggggctcgcggcaaggacggtggccgcggggcgcgcccgtggcctcccagcgccgacggcggaggcggcgttcggcctcggggcggccgctgctcccacctcaacgacgcgagtaccggcggcgggcgccgtggctgcggccgaggtgactgtggaggacgctgaggcgctgccggcagccgcgggagagcaggagcctcggggtccggaaccagacgatgagacagagttgcgaccgcgcggcaggtgaggggctgccgacccgggggaggcaacttgtttacgcgcgcgagccgcggaggatgcggtgtaggggggcggagatccgggacccgggcgggcgtcttccctcggctgcggagggcagctggcgacctggggacgagcgcggggccacgacgccctcccatcccccggccagcgacctgcctgggctcggctcccgagggcctggtgctggccgacgggtcagagcagcatcctcgcaggtgcgggagaatggaattccagggttgcaaagaaacgccacttcccctctttcattgttttcgggcattgattctcttccaaggaacctttccctctttttccttacgcacatcacctcctgtctgtgctggcgtgacagctgttttgagaaaggactttagcaaaagacgtctgcattttctttcaaacacaactctgtagtgcccccggacaaggattgagatcagtgtctaattgagatctgcggaacacctgcatccgaatcacctggggttgctggtgaaatctacagttttctaggccctaccccagttttactgaatgagacattccctgggtaagagcctggcatctgcgtgtttaacaagcacgccggataattcttgcacgctaaagtttaagagctatagtcagattcttgaatattggttcttgaacctaagagccatggttaggttcttgaataaggggtttactgtataaacatttaatatagggttttctttgagtttctcagcattcaaaaaatgttacttcaaggtgattgttttaaagcacttttcaaagtctagacacaatgtaaggcatgttaacagtaaatttgggggacagccaatcttatcacacccgtggagaaagtgatgtcccattttataaatggagtgctaaagggagcattaagtaaattaaactagggaaggctgggctctggattggaacatattttagacttatagtcattactagatcgtaacaagttagatttaattttaaattaatattagaactttgatctatatatctggagactactataaataggataagtactaaaattctctaggcaccatttgaatatataaacatttgtaaatatatatatataaaacaaagttttcttaggtttgctaatgagtcagttttcctggaagagtgtttttgtttatcataaatttctgaagctcctgctcaaaatgaattacatgaagtagagttgagacgttttctttttcttagaattcaaatccacttcaacaggtacttactggttaacaagagcccaaggatgccctgggtggcagaggttaggcaggtagttcctgccttccaggagagtgtgcagtctaacagtacggatgaaacgagaagacctataacaacattacagactagaaacagtgccagtgtcagggatgtcccaaggtttttgtggtgttctactaggtgaggtatgggagtgagggtaggtaagaagataagagaaggttgtggcagaatgagttggttcctgaaaaatgggtaaaattgtaatggaaagtcactggacttgaggaaacagcaagaggcacagaggccggagattatgtttggaaaacattttgtctctgtgtatgtctgtgtgtgtgtgtgtgtgtgtgtgtgtgtgtgtgtgtgtgtgtacgtaagcgatatagacatgcacatatgtatgctaggcagggagaagtagatgaggatagaaaaaataggttagagccgactgtatatgcatatagtctgatgctaatagcatcattgtcacttgggagtatgttaaaactccggagtggggcaccaccccacactccctgaatgagagtatctgcattttaacaagatcaccgtgtgattcacatgcacgttaaagtttgagaaatgttgggtagagtatcctgagtgccaggcttgatcaaaattacacctaaggaatgtttctctagcaatagtgtgtactgaaaacttgagttaagaataccaaaaggagagtgttatagcagttcagatgagaggtttagtgtaaagtggtataggacagaggggacagagttgagatatttgatgcaaaatctaggttcctggcaagtgaatgcattcttcctttcttggtacccttgtccagagattgagactgcgtggccagaagttgacaaaagaggtttaagggagcagggaagaaaaggtaaggggtttggtgttggacatgtgactcggaggtgcaggcaggacatccagagggaggtaggcgggtggaaatgagtgactagagccagtgagaaggcagcataaatatgaataggtgaagctgtgggaaagggaaagctcatgagaaaacctcaggaaatgccttttattttagggaggaagatgagccagcaaaggagacagaaatacagctggctaggttggaggtacaggaggaggactgggaagaaagatttggcgatgagcacacttaaagagtttaaatgaagcagcagagacaatactcaaattgcaagaggttaaagattcaggcccttctgccccaatccctcctttcctcactgatgaggtaatttttaggagaaggaacctccgaacttacttatgtactgaaaagagggagcctgtgtagatagaatgaaaatgaaaggggctgggcgcattggctcagcctgttatcccagcactttgggaggccaaggcgggtggatcacctgaggtcaggagtttgagaccggcctggccaacatgatgaaaccccatctctactaaaaatacaaaaaattagccaggcatggtggcgggtgcctgtaatccgagctactcgggaggctgaggcaggagaatcacttgaacctgggaggcggaggttgcagtgagctgagatcgtgacactgcactccagcctgggcaacaagagcgaaactccgtctcaaaaaaaaaaagaaaaggaaaatgaaaggaacaggtgatgaggtgaaggtagttagagaagatccacttagcaaacaggaggatcatttctttctcataaattgcagtgaaaacaggaattttggcttgaagagcatacatgatcaccaaacagaattgcctaggaagagatagagcccagttttggggtctgccttgtagtgtggacttaagatagtgtggaatgtttgagaaaccttgaataagttgatagtcaacaggagataaatacgcagtttataaaagttttttctaaatgctcttaaaaaaagataaaaacccagagaatattaattagttcagtaataatagaccggtaattctgtttgtttcaaggagtattaggggaacagatttgaattaaccaagcgtttactatgaacagctgtgaagaactgcagtactggcaaaacttttaaaaaggaggaggtgtggaattatctttatttttgcatgttgtcttttgatactcaagaagcaatccgagattcaccagttcattgatacttttctcttgatggaattttcaagtttcattctaagtgcttactctgcatatcaagcatgtgaatgagtgaataagctatttattttctttaaaagttagctaaaataaacttgtttttctggtaccaatctcgttgtccatgttcttctgctaaacattacattagttgatatttaagtgggatggtcattgcagaaagttgggaagaaagtctcatcacctcactgttagattttacatatgtttatgtaattttgtgaattaccagtcttctgacttcaacacaaatagcaaattgcaaagtgttacttggggttcttgggatgggttgggaagtcattctgacaatctcagaagttctaaagaactagttttatcttaactatcactaatttgcaaagtacatgttcctttttcctctggctctaattcctctctaacaaaagtatttctaaatttgacattaatctctggtgcttcttcaatttgtgcatctgcaaactgatttttttattaaatgagataacatgaaaatatttgcaaatataagatgatataatttctctttttttcctctgtcgttttacaaagtgatctgatgtgaaacaaaggtacagaaatctagtcttcctcagactttcagatttataatcatttttttgtttgtttttttaactactaggacccttgaatagtagcatatcagaataccatgttgaaaggaagctcagtcatatagtcctattcctattcactcacccaactccagacttttaaagttaactaacagtcacctttaaggaagaatttacacagaactttcaaagcaagtaataagccaaaataaatatacttcaggcaagtaatgaactatcctttgtgtctgcaattgtctttagcttaattgatgccaggactgtgcttagactatgtggacagggatgggagattgctttttatctgatctcaggtccctgcattcataggcatcttccagattgcagagaggacctgtctttatcagttgctgtgagctgtagcttcagcgtgtctctttactccctaaacattgcctgataactccatttgcttttctccttttttgtaagaggggaacttcttatacatttttattacaaattgttttaaaatacaaaggagaaaacttgtaagttgcagagctaaatgtgaggggaggagataaatttgtgtgtttaattccattctatttgtaaatgaccattttgattaaaagtctttcatagggccgggcgtggtggctcacgcctgtaatcacagcactttgggaggccaaggcaggcggatcacctgaggtcaggagttcaagaccagcctggccaacattgtgaaaccctgtctctactaaaaatacaaaaattagccaggcatggtggcacacgtctgtagtcccagctactcaggaggctgaggcaggataatcaattgaacccgggatgcagagtttgctgtgaaccaagatcatgccactgcactccagcctgggtgacagagtgagactctgcctcaaaaaaaaaaaaaaaaaaattatagaataaagtagaaaaggtactttcaaaaatgttttaatgtaacaggaaaaggatatctgttacgcttatgttaaacctgtaccactgaaaacttagattgtatgtctttaaggtctagctgatatgccaaagttataaagtatagttggtaatttttgatatatttgttatgatttggggcatggctagtcttgtcatatgtttaagtaaaggaggtttgacttgaagatttacttagtaggtgaggaccaggaagtatagtctaatcagtactactttgtttctaaacaagaacatatgcctcctttagtgagggcacaagtttgggcaaaggattctcagctacgccaaaaaaacaggttcaaccaaatcacatttatagttttgtgaaataacgccctctccccaacccccagaaaggatatttgaaattttaaaataagcagttgttaatgtagaaactatttaatccatacaatgttctcctatcacctgcttgtcttctttcacatcggaaacttccacaggaaataaaagttcctttaaaatgattttatgaagaaatttagcatacacttatcagaatttgataaacttaactgtaaataggcaggtgttctgggtaacttaagtcagcacagtttttctttttttattgcgtattcattgtggcataaagtcatttctcctggattgaggacataatcagagcaattacaggatgaacgacatctatgagatttctgagaggaataaaaagctgcacgttttagtaatatagtagttgccacttatgcaaacttacagttaacagaataatgagttaaaaacctgaatttctgctcctgttcaaaattttgtatttggtgcataaccttaggtaaatcacatcttttcccatcttctcagcctttttggtggtgattgttttgtgtagataatatgtttgtcctaccaaggtttattcattcaacaaacatttatttagttttactggggcccaggtactgctaggccctgagagtagataaatgtcttttccgtaggaagctccaagcctgacagatcattgtgttaaagaattaactatcctcgaatggataataagtgacataaaagtagtgtgagtgaaaagaatggaagtggcaagttattgagtcccggaatgagaaaaatatcaaggacagtgtaggcaacagaatagtgtgagcaagggcacagagcagggagtttgtacagtgagcacagagcagtggttcctaagccagggctccaggacccctacagatctgcaaagataaaaatggggatccatgagactgccagtattttaaaataacctaatggaaattaaatatttaatagaaggtacattaaaaagtgaagttcctttgctttgaactagaattatataaaaccttatatagtaattacagttctttcaagaaatgttgaatattttgattggttcttaagtatttcctctaaagatgggagaatttattatacacagtgttcatttggcaggtggaataatttaagacatggaggaaaatatagacaagagaacttttgaaaagttcaccccatggaaaggggggagtgtggagctgggaaggagaggggagagagggttgggctggtacaagaggcagaaaaatgagattaggaaagtacaccgaaaccaaattgtgaaaggctttatgtgccacaccaagcagtgtgacctttctttttcagtgggcacagggaaccttggaagtttatcagatctctattacagaaacaaaactgtgggaagaagagaggggaaagaaacctgaggcaggaaaatgtgttagaaagcattttaaggtgttctgatgagaaatgagaatcttctagagcaagagctgtggtaatgaagaaggcaaagattttttttttttttttttttgagacggagtctcgctctgtcgtgcaggctggagtgcagtggtgcaatcttagcttactgcaacctccgcctcccaggttcaagtgattctcctgtctcagcctctcccaattagctgggattacaggtgcatgccatcacacccggcttacttttgtatttttagtagagatagggtttcaccatgttggccgggttggtcttgaactcctgatctcaggtgatccatccgccttggcctcccaaagtgctgggtattacaggggtgagtcaccgtgcccagccagaaaagatttaagagaagcttcagaaatagaattaagagtacatggctgttgtttaaatgtagaggatgagggagcacaaagcagttgatgtctgatttaaatgttaggtaataggatggatggctacccttttaagtggcaggaatagattgtgggaaagaagtttcctgagcctgttatggtgataacaagtagatcctgctgaagatgcagaactaggataggggagagatggtgaactataaatcctgtacaggtttgggggctgtcatactatagatggaggtgaagctgtagacattgaccatctaggtagaacatgtagtacaaacaggaaaatgcctgctctatagatagaaaactataaggatgatnnnnnnnnnnnnnnnnnnnnnnnnnnnnnnnnnnnnnnnnnnnnnnnnnnnnnnnnnnnnnnnnnnnnnnnnnnnnnnnnnctataatcccagcactttaggaggctgaagcgggcagatcacctgagtcaggagctcgagaccagcctggccaacatggtgaacccccacctctactaaaaaatacaaaaattagctgggcatggtggtgggcacctgtaatcccagctacttgggaggctgaggcaggagaatcgcttgaacctgggaggcggaggttgccattgagcagagatcgtaccattgggcgacagagcaagactccgtccccccaaaaaaaaaaaaaaagaatgatagatgaggacccaggagggactggtcctgtagaaaccaggaaagaaaaatgtccagaatgaggagctggccacaacggtggcttttgtgaagacaggcctgatgaggggagtgaatctggcagttaggaaaccattgaaaatctttcttgagagtggcttccaaggattggatcatgggtgagagttcagggcttgctgaggaatcatccaaataaatgcttttgtaagctacagcaaaatgtaagtgagagacagaagtctccaaagtatttactgacagagatgttcaatatgccttcttcatccacatcataaatttaatttttctctatggaaatgactaaggtaaaacagtgtttgcacaactggtcttatgagactcacctggggtgcttgttaggctacattctcccagtctccctcttaggatgagacgtgggaacctttaatggtttttaacaagcactccagattatttttatgatcaggtacacttgggttacactgagataggtgaaataaccatattttgcctatgaaaaaataactcgaatgaagccatgaggagaatgagaggagagccttggggatgtacacccaggtctgacttaggctttggttctttccactggaaaagctgtctctgcagttccttcaattcttgaataagttaagagtttttcatcttgatcttggaaccctcaaaatagggcaagtggtcttggggagataaataaccttatattcttcctgttttgggaggtgttcatttttcactttttatctctgtttatgtttcttcttctttctggagacagcatttcactctaacacttaggctggactgcagtggtgcaataacagttcactgcagccacgacctcctgggcacaagcaatcctcccacctcagcctctgagtagctgggactacaggcatctgccaccatacccggctaatttttaaagtatttttgtacatttggagtctcagtatgttgcataggctggtctgaaactcctggccctccaagcagttctcctgcgtcagtctccctgagtgttgggtttacaaaggaaagccactgcacctggctgtgtttgttctaaatgccataccttttttaagttcaacttttatttcagatacaggaagtacatgtgctgatttgttacatagtatattacacccaggtagtgagcatagtacccaatggtagtttttctttttttttttttgagatggagtctcgctgtgttgccaggctggagtgcagtggcgtgatcttggctcactgcaacctctgcctcctgggttcaagcgattcccctgccttagcctcctgagtaggtgggactacaggcatgcaccaccacgcccggctaatttttttttatattttagtagagatggggtttcaccacgttggccaggatggtcttgatctcctgacctcgtgagccaccgcacctggccgcaatggtagtttttcaactcacccccggccagtactctgcagtgtctattgctcccatgtttatgtccatgtgtgctcaatatttagcttccacttataagtgagaacatgcagtatttgattttctgttcctgtgttaattcgcttaggattgtggcttccagctccctccatgttgctgcaaaggacatgatttcatctttttatggctgcatagtattctatggtatatatgtaccacattttctttatccagtttactgctgatgggcactagactgattccgtgtctttgctcttgtgaatagtgcactaaatgctgtatctcattgctatcctctggtcatccctgcattcagcctgaggactttgttttttagcattatctgtctacttgatgtttttcttgatctacattatgccaatgagcacctctttcttagactgtgattaggtatagtagcaaatctttattgctccggtggtgcttcttaattccaaccacagcagaaggggtgcctccattccagagacatgcttctggggaggagcccataatgaatactacagctggcttgtaatgcaagagagtcttggtcaacttgcggctttactttgaatttatatacattgtgcatcaagtgatatagaagagataaagttgcatcttgtattcctgaccaggaatataactatacatgcttacagtgtgcatggtctttaaagctgataaatacacataatgaattcatagaacaactgtacaagtcatcctttaaacaactatttaggccgggcaggtgggatcacacctgtaatcccagcactttgggaggctgaggtgggcggatcacctcaggtcaggagttcaagaccagcctggccaacatggtgaaaccccgtctctactaaaaatataaaaattagccgggtgtgatggcgggcacctgtaatcccagctacttgggaggctgaggctggagacttgcttaaacccaggaggcggaggttgcagtgagccgagattgcgccattgcactccagcctgggcgacaagagcgcaactctgtctcaaaaaataaataaataaaaacaaataaataatttatggagagtctgctctgtagctggaggtgtatgttccaggcagaaggaacggtagatgcaaaggccctaagcaaaaattttgcatgatgtatttgaagagttgagggggtctgtctatggatatgcaaactctgaaaagcctgttagacagtctaaatcaggtaggtggttaggtatgtatgtctgcagttcaggggagaggcctgaaaccagatataaatttgggagttgccaggatatagatggtatttaaagctatgagactggatgagatcaccaaaaaaattacatgtaggtagagactattttaagagataggaaagataagaaggaaccagaaaatgaaactgagacagaatagcatagaactgagtccaaaaaaaaaagagcgtggtgacctggaagccatatagagtgtgtttcatggagggcagaaatggctggtcaggtgctgctgggtggtcaagtgaagcaagacctgaccacgggatttatcagtgtgaaggtcattcttgactctgacaagaaccattttagtgaggtggtaggggcgagaacttgattagaaatagttcaacatagaaggagaggaagagattaggagacagtatataacaactctttcaaggagttttgttgcagaggggcaagaagtagattggatgcttgaggaggagaaggattcattttgtttgatctggtttggtttttaagttggggaaaatagtagcaggtttgaatgctgctataacaaaatactgtagactgggtggtttatagacaacagacctttatttctcatagttctagaggctgggaagttcaagatcaaggtactggcagattcagtatctggtgaagactgattcttcacagaagcactcctacatggtggaaggggcaagggcatctctggggctgcttttataaaggcattaatatcataagtgaggaccccaccttcatgaactaatcacctcctaaagccccacctcctggtatgatcaccttggggattaggtttcaacttatgaattttttggtggggacacaaaagttcagtttatagcaaatgctgatgggaatattctagtagggaatgactgatggtgtgggagtgacaggagacatttgcaggagcaagacctcacgaatgcgtaagggggagctctgttgcttaagtggaggtgttggcggtagatgggagtgtggacagttcacttgcactaacaggagggaaggtggaacccatggtccaggtactgttgcatagatagaggtggtagggggaaacaagctgatttctcctgtttttccctatgaaataggaagcacagtcaccaagatgtgtgagcttgaaagagctggcatcagaagtttgaggaacagggagacatgaatggttaacatggttcagtggcataatggatagactagggaagggtgttatgattgttgagcattgttagtagcctttttgaggttggtggtcgttaattaaagtgaggatagtcaacatggtatgtttctcttcagatacgttcaactgcacagatgtaggagtgagaaaggggagaagattgactttaaccagttcttccagagtgtgacatgtgagaggcagggtagggagttgaggtgtgtgcaaagtagtgcttaagatgaaggactgtgggattttaactggttaagaaagaagtgagggcatggtggtagtgaaggttgtagtatcagtggcttgtaggttctcatagggtcagaagtttcttggagtcagggaagtagaggaagtgagctgaaaagagaggggttggtggttagggggttgcggtgatttgtaatgacaaggtctagagtctgaccacaggagcagctgaagcaaggtagatagatattgaaaacccaaagaattgaggcagaagtatgttaaatatgttaggtggtgacagtaaaccagcagctgaaatcctccaggatggggctagttacctaagggtcaattagatgtctactaggaggggtaagggacaaaacagtctgatcctgaggattttcagagaggagaggaaaaaagtggtctggaaatggcaatgagatacatggagtccacttaccccattctgagcaagggttatgggagaaaaaaattatctgtgcttctgtagggaagcgatatcctcagggaaagcccggtttctatgagagcaaaaagataagtgaacgatcagggaagacagtgtttcaggggaaaggctttcaggaggtatgtaggtagaagaggacataccaggggacattgtgttccttatgggaattagagtgtggaatgaagggtgacctatgagtcaggggcttttcataagttacataaacagataaagggcatattgaaattgtcttggtccaaagacagtggtggcaagagtggtagaaggccccctcttcctttctacgaatagaggcctggacatgggctggttttcttttgagcatgtgggataagtgcccaatatcttagatatctgttaattttaaaaatatttttaatatttacaggtcattagtaattatcagcactttagatgggagaattgctgccttggatcctgaaaatcatggtaaaaagcagtgggatttggatgtgggatccggttccttggtgtcatccagccttagcaaaccagaggtaagaattttctgttaactgttgactagaaaacttaattctaatgagtaattgctgatattaagaagtttggggccctattgcccaggtttgaggcctgtctgcctcttacagtttgtgtccctttagggcaattacttaacttttctattcctcagttcccctcttgtgaaatgagatggataataacatcttcttaggattacttggggcattaagtgagttaatcctataagtgagcagctgaggatactatctgccatatcagcaaagcacattatctgagctataaatgattgtttattatcatcacaagatctctaggaataataagataaatataaataaaaactttattgaattttactagttagaaatctgtgctgcaaaatcccataaattattattccctaattataagcagaattcatctgaaatttttttgtaatgtaattccaggtaaatttgattatttgcagaaaaagtgtacttaataatttggagctctagaatagtagaggggaaagagcatagattcaaagagacctcgcttccaaaattactctgtcacatgacttcaagcccctcagagctttagttgttctcatcaataaagtgaggacacagcctgcccgcatggggtacagatgggggagattaaataagagaagctgattttcctcacctttagtttcaattctgatggattaagtctctctgcttttctggagctttagtctgttgtttaaattacttaaaaataagtccatcttttgagtggtgactactaacattgaagcagtcacctctgttttccagaatgcctgtggccttcttttatatcgagttgttcttgtaggacactccctagggtagtcttttttctcttttgtcatcagtctttttctttaaaaagcttcctagctgatattaagtatggaaaagacaaaatcgtacatgaggggtttgagaatgacctgaatattggtgaccaaactttccaatgggaaactgctaccagtgacgcatctataataacagactttcctgtgctttccagtaaacccagcccaaatcttttctggtgcacccaaactgatatttaaggaaacaacactgccaaatttccacatttgctgtgtgctgaaccctgagtagactttataagtggctactgtttctcagtatactgaaaatatattttgagaatagagaacttctattgtattatgaattattaatacaaatagcaatttgattgtaaattacattaagtttataattgagtatggtattcaagtgaattactacttaagataaacttgtttatttttcttctgctgggattatgcttgggtatgcatgttttactttatttttaaactagacataagagatgatcagcaaaatgagaagattgtaagctgcttacatctgaggtaatatcacagtgtgttgtagtagttcaaagcatgtgtgtgtttgcaaactgaaatatatataggtacaaaaagataagttgcatggtatggcaaagtagaatgcaaatagttgtaataacctgagtgctagtaagtgtgtttgagttataagcagctagttgtatttgaaggttttcttacacatagccgttatattagctgtttttaaaactacagttcaacattcttactgtctttagttcgcaccattttctgtggtttattagggctcccttgttttcagtgtcctctctcacacccacccacccccaatcctagatcttttggataaaatttttgctttgaaatgttgaatcgtaggccgggcgtggtgactcatgcctgtaatcccagcactttgggaggctgaggcgggcggatcacaaggtcaggagtttgagaccagcctggccaacatagtaaaaccccgtctaaatacaaaaaattagcaaggtgtggtggcaggcccctgtaatcctagctacttgggaggctgaggcaggaaaatcacttgaacctgggaggcggaggttgcagcgagccaagatcgtgccactgtgcaccagcccaggcgacagtgcaagactcccatctcaaacaacaacaacagcaaaagaaatgttgaatcgaaagccttttcagaaagctcactggtcgcttttcatgcaggaaaagaatcctgatacctctttgcattatctagattttcattttctacttcatagaaaaaaaaaaagaaaatctgaaggtattgaaacagctgcgataacatgatagattaactagattttactgctgccccaaattcttgggaccatttcttgagagtggatgtttaatatgtagagatactgatgatataacgttgttcccagcattgtaacatatactcgatgctgcttacacagtgtaatcctcatagtaacccttctgaggttgataagttggtcccattttgtaaagaggaaattgcagctcaaataaatttgcttgaggttgctgaccggctatatatatggatgaagttggaactgagcccgagattgcctgactgtactccattctgcctgctctgaagcccttttgccaccttgtatatacctccctttctttacaagctcaggctcttcatagactacagtggttctgagactgtttggtgtcaggacctgtttatactctaaaaaattattgagggctctaaagagctttttatcaggctggagtgcaatggtgtgatcatatctctctgcagccttgaatcctgggctcaagcaatcctcctgcctcagcctcctgagtagctgggactacagacatgcaccaccatgcccagctaacttttttttttgtggagacagagtctcgatattgcctaggctggtctcgaacccctgggctcaagtgatcttcccaccttggcctctcaaagtgctgggattacaggcataagccaccacgaccagcctaaaacaaatgtttaaaaaacatgtattttattaaagaaataacaataaacccactccacaataacgtaacatttttatgaataataactatattctttaatacaaaaaatttaatgagaaaagtagcattttacatttttgcaagtctcttaaatttttggtttaatagaaaacagttgtatccgcgtctgccttaaatatattgcattgttgttttgatttaactacgtaaagaagaaaatccagccacatacaaatgtagttggaaaagggaggaatattctagtagccttttcaaataattgaggccattcttttttaataatctgccaaaacaagtggaagttttttaaaggttagttgcagtgtggaatcagaaaccatatcaatgaacattttatactctgaacactaacatccattggtctgtcttgccttttactcatgcatgattttataacttagaaaatactgactgagttacatagatcttttaaatgttggcatatttccttatagaatattttttaaaaaaacaaatttgttgctgttaccactgatctcatcagaaaagtctgtaagtactgggaagctgtgaagcgcaaattggcagatccaagttgttttgttttgttttgttttttgtcttttagagacagggtctcactctgttgcccaggctggagtgcagtggcgtgatcatagctcacagtagcctccaactcctgggctcaagcagtccttccacctcagcctcctaagtggctaagactataggcgcttgccaccaagctcagctacctttttttttttttttttttttttttttgtagagatggagttttcttattttgcccaggctgatctcgaactgctgggctcaagctatcctcctgcctcagcctcccaaagtgctggaattacaggcatgagccaccatgcctggcccaagttttccagtattctagaattcacttaaaaacataaattttatcacaaataccgtcagatgtgttctttgaagtaaaaagttcactttgttcattttttagaaaatgtctaccaaatacccagttgacttttgagtaaaattggagctcaatgaacaaagctgctagttcagctcacaactcagttctagaagtgcttttcctcaagacatgctttagcatgtggagaaaggcttgttacatacttcctaattagtcatgcagaataataaaaagatgtgttactcagggtcaagatttaatgaaatcagtcatttttattgcttcatcaagaacatttgtaagtggaactgtctctgtttttttcctttagttcaggtgtatgacagtgaagaataccattgtattcttagtttggttcctgaattgtgccaaggcaccggcagttttagtcagcattgcttttataccttcagggcaaatagcaacctttgtgaaaaggcaaatcacaccttgtttgaaaactgtgtgctattttgcacccctgaaagaatccacgaaccatactttgaaaattacttaattggtatatgatagaaatataagaatatttgtgaaattataaacatattagcaaggagagaagactgtattgtgagcatgagtcatctgttattcagcaaggtgtgtgctgctcagcatctagaagttatgttcaaaagttgaacatttgtccagttcagatttagaaaaaaaaaaagttggacaaaacaccacaaaaggatcatcaaggccgggcgcggtggctcacacctgtaatcccagcactttgggaagccaaggcaggtggattgcttgaagtcaagagttctagaccagcctgggcaacatggcaaaaccccatctctacaaaaaatacaaaatacaaaaaaaaaaaaaaatacaaaaattagccaggtgtggtgacatgcacctgtagttccagctactttggaggctgaggtgggaggatcacttgggcctgggagacggaggttgcggtgagtcaggtcacaccactgcactccagcctgggtgacagagtgagaccctgtctcaaaaaaaaaaaaaaaaaaaaaaaaaagaaatcaaaaactgccatttgaaatgctgtgaactggatgcatagagtaatactaccttcaaaatgcatctggtgcagtgttttcttaaggtccttaaccttcataatagttaacttttttaaaagtagttaacttcctctctcagaaacccagtgtgtttggttgtaaaggctggtgtagggaagagggccagttgtagcaggcagaaagagctggcatggatatatagcaggtgtcacctcccaggtaacaataaataggttcatggcttcctgtggggactcctgtgttagaatgtcagtttctccaagctttcatcaagaatggtatgaaagttgggcacagtggcacgtgcctcctgagtagtcgtcccagctactcaggaggctgggcccagttgagcccaggagtttgaggccagcctgggccacatagcacaaccctgtcttatgacgaggaaacagatgtaactcagaagaccagagaagatgtattctctgcaactatcaaagttacttattaatctgagaagctgaaggataaaggatttgatagactgtataataatttttaagttattgataaaggaattgattatggatcccatgtacttttgctggaatactaaagccacacaggaactttttagactgtgtggtattgtggaggagggactaggattcaggagcttcagttttagtcttaattcttccattaacttactgtgtgaactggctaaattatttaatcagtagagctttaatttccttctctgtaaagttatagaattggactacatctctaaagataatctaacttcatgcatcaggtacagtcacatacatgaaacacccaagtaaattatctggagaaatttttgaactttcccttttactacatttaaggattcttctgaaaataaagaacaaattcactaggaattaccattaggtacatacttgcctcctggcttgctctgatgttcttaaccttttctgatccaaaaggcttacagaatagtgtattttgttgctttagtgggattttgattacgtcaatggaaaaaataagctcctggaagataagggaaattgacagttccactaagaacagatgttttaaattatatttagaatgaattgtatgaattgtgtaccttgggacacacatctcatttgccactatctcctgaaaagagtgtggatacataaccaagctaaaaccgttaaggtgcatgtttgtgtgtcttagaataaataatgcacctaaagttcactctattagctttaacagatgtgcttaggttctaagcataatatttttgccagttaatagtagctaagaattttgtttttaattttcagatgtgaaatctgatttgctttcctctagtaatttatattcagattcaaccttgataaaagcactaaggaaatttgtctgtgattcctcactgattgccttaaaattttgttttgtaacacatgagcatcgttttttctttaggatctctgggctacatttggatcacttcaccaaatctaagtagattgaactatctacttctttatgtcttggaactcatttttaaatatgaagaccttccttattgttattcagaatgcatattgtaattgtgtatatataactaatttgtacttagatgaatacctttatctttatttagagataccatatttgttttctgttttggttttctgttaaatatgccctttttttcctcttaagaagaacaaacaactctatcgtctaaacttagataaggtttggggttttgctttattttaggcatgtttctccccaagggacaccgcctttctgtttcagacaggtgcagaaacagacagctctgatgctggtgctctccagcctcctccccctccccatatcagactacattccactaatataagggctttgaaaagtgggactgcctttgaaaagggtacagctttactggttactgatttgtttagaaagagtctattagtagacccttttaagtatttattaaaagaggatctgtaatctcttttaaagcttctcttacttttactgaaagctgtccaagttgttttgcagtttttcatttgcacgcaaactagcacattttgagtctgtgtcatctaagatggcagtttattttgaagcatagctgtcaatcatgtagcaagccaatatttaaataattgcctgggttaattgcttttcttttaattatagaaatgaaacagtgctttaatttaattttgttatattaatcccttagcatggctgaaagcagtgctgtgaactaagctaatttatcccagcattgcatgtcaccaaaggagaaactgatttggccctggtttttttattttttattttttttttttaggaaattgactcttcatgtacattgtttatgtcatgaatatatattaatctaggtgaaggcagagatagttattaaaatcagtgttcttttatcatgactgtgagaagtatgcttaaaaagctagtctggtagtttcccttgaggcattttgttttgtaggttgattaaattagtgaaaaaaagaattaaacaattgttatcaacttgatatttctctgctcttgagtactaatttacattttttaagataaataccaaatcattgcagaggtttttctcaacatttaagcatatagcatatcacttgggatgcaatctgactaatacccggatctgctgaacaatctcattacccctcccgttagggcatcatcatctaatggtgatgccccttcccttgtctttcaggtatgattcctggagaccctttacttttatcaaacagtcttccttttactttccccaatgtttccagggaagtaaaaatatatatttccataatacaacaatgttgaagcatcttttttttttaagtcacaaatagtcaattctgatatctagtagtgtagtcagttgctcattttggttaattaagatttactgtttatgttccattcaagtgtatcatttttgaagaattaaaatatacagacatatacttgttaatttttctttagcactgattgtctttattgattaataaagtactttcaatccgttagagtttttatgttacaatcaaagaattttaggcttgatagagctttctgataaatcaaaaactgcagcagtttgatatattctacactgaattaatctttatttggttttgaggccttgtttttaaacagatgtgaatccatgtttgggaaagaaataactgaccttgcataattaagctttctgtctgctcccgcctttaatttacttgtggagcaggtattctctagaattcaaaaagcttttgttatttttgaaattttgtattcatgaataatagttctctcctgaagtttccaatagagaataaaataaagctcacaatgaattataggtagtcacatgagctagactgagtttatatttttgcttttaacttttttctttcataagtatacatgtatatatacacataaacacatacaaattaccttagaagttcaaagtaagcagccctggatcataaacttttgtttgagtagcactttatagtttgtaaagtgatatctattcttagtcatttacatagccctgtgaagtaaatattcttattaaccctaattttttgcatgataaaatcggggatcaaaaaggttcagagatttatctgatatagtaaaggtgagactcaacccgagatctttgtacttacatctttccctctttccaacatttaatgctttttaaaataccttaatgcttaccaatttatttgtattttctctactaataattcttcatgtgctttatggagattaattactcaaagacatcttgcgtacagcatacttagcacgtagctcagcacattttgagcatctaaactgcttctaggacaaccctagtgggatagtcacaggcaccaaaacttaacacatccaaaactgaattcagcattgcgggattgcaggagggaggcgtgcagaattgtgcactgcccaggacagatgtgattcttgcctttctagaacttataaggtactgtgtggagccagctagggaggcaaatatgaaataattatagtacaaataatgcaattgagtgtggtaactggcacaaggcaggatagagcacaaagaaagactctaacaagcataagtgcttacctagcctgatggtcaaagaaggcctctcttgtatgatcaggagttactgaggcaagagatggatagagaggagggggaggattatgctgggagaggaaatagcctatctcaaggccttaaggcgagagttatcatggcatgtttggggaactgagagaagttgaggatggcaacaggaatgagggttgggagagagcagccgaaatgagcccattgaggtgggccaggatcaggttatgcagggtctagtaagctatgttagacattccagattttatcctgagccatgagaaaccattgaaggtttaagtggaagagatcactctgactgtagaaaatggactgaaacaacagcagaaattgggagactatttctagtctcccacactagttaagagactgcatggtagtcatccagatggggatgatagactggatggagacagtggaaatgagtgaagtaaagtgacagattcaaaagatgtttaacgaggaagataaaattacaagaccaaaggaggatttagtagtaaattaagaacaggtatagaaaggaagaacatgtgttgtttagatatgagttgggagagaccatgagagctctccaagcagagatgctaaagaaggcatttgactttatgggtcttgtgctgacagaggaaaagtctgggctgaagttaaaattagaattgcttgtgtcatgggaactgagaagatcaatcaccttgaaagaaagtagggtgagaagacctatgaccaaagctttgaagtccaacattttaaaattgagagagactgataagttagagaaaattgagagaaaaagtgtttcaatgatagatttgttttagtaggattttagggattatcctgctttccttcagatttttgcatctgctacttggtgtgaagactttatgaatatgtataaatataaatacttccataattagagataactgatttataatgcaaatgcctcttcaaacaactccttgatttgttagtcttattgaaagttttgcagcaaaacagaacatcagaaaaccctttccactgtcaactggggaacttggaaagcagtgggaaaaagcaggaagcctgtggatgcccaaagtgataaaagcattagtcagtggttgaagaccaaaaaggaatcccttttaagttagttgtggagagcgattttgagaatcaagtgaaataaggaaacgtgagacattttgtaaaacagtgaagtgttcgtttttatccgaggtcacatagtaaatgagtagtagagtcagggacccaggggatggggctggatgaggtgcagtcagctggtctggttggtatggatacatcttgattttatgttttggatgtgtgctgttgccccatcaccttggtttgcaaaacaactagtatggctaggaaagtaattgttctaggcaaaggagacttccagataataaaaaagtcaacaatttagcatttttaatggcatatttttatttttcttttttttttactttaagttccaggatatagcagaatgtgcaggtttgttacataggtatacatgtgtcatggtggtttgctttacctatgaacccatcatctaggttttaaaccccacatacattaggtgtttgtcctaatgctcttcctccccttgctccccacccccgtcaggccccagtatgtgttgttcccctccctgtgtccatgtgatctcattgttcaactctcacttacaagtgagaacattaatggtgtattcatgtatttcacatcttcccaatcttaatgagttgtatctttttatttgtaagttgtaagaattatttatttgtaaatattgtaagaatgttattgtattatcctagaaatgctctctggggttcttaggtgggacagggatgtgtgcccctttaataaatattctaggataattggtgttttacactctctttcttcatggcctatgttcattcttccttatctctacattcagtgagtctgcatcttgccacactctttttcttaccccctcttctcctttttaaaccttgttgcttcttagcttatacacagaacttggcttttgttaactatcagggccagtgtgttcctggttagggaacacactggtctcaccaagtctcctgaacccttttcaattttcagttttatagtgggtgagttacttctggatacaatttttgggatttgagagtgtttaatgcctgagtcactaatcaagaaaatgctaatgtatgcaaatctggcttccaaaaccgaatgaggaaaagttctttatagaaaaatcctaactaggccgggagtagtggctcacgcctgtaatcccagcactttgaaaggctgaggcaggcagatcacgaggtcaggagactgagaccaccctggctaacatggtgaaaccctgtctctactaaaaatacaaaaaattagccaggcatggtggtaggcgcctgtagtcccacctactcgggaggctgaggcaggagaatcacttgaacctgggaggtggaggttgcagtgagccgagattgcgccactacactccagcctgggtgacagagcaagaccccatctcaaaaaaagaaaagcaaaaaaaaaaaaaaaaaaaaagaaaaatcttaactaataaatgcagaaagaatgacaaaattagaaattgctattctagttcttttattgaaatagtaggccatcaagcaatactaaaatggtaaaaagttgatgggacactttaaatggagggatcaggctgactcccccaaactcaagtgattgatagtaacatcattaaaagtggggcatgcaaacactatgtgcctcctaatatggtatagcataggggccagcaaacttttcctgtaaagggccagatggtgcttatcttaggctttgaggatcatgtggcctttagttgcagctggaaagcagtcatagacagatacataaatgaatgaatgtgtggctgtgttccaataaaacttttcttacaaaacaggcattaggctggatttggctcatgggctgtagtttgtagacccctaatgtaataggaagtgcgtagcaccagatacgaaggcttcttgtcaaaacaactgaacctgcatcagatcaaagctccaagtctaatcatacttttcaggaaatataggaaataaaggaacaagttaaatgacatgtagaatcctgactgtgggacattctataggacagataatctggtttctcaagtaaatcagtgcataacaaaggggttgaaagaagttcctttgtggagggaaaagaatcagatgtaatatgtagacttggaattcctcatcataaagtagatctttgagataataggagaaattttaaaatttgatgattttactccagtaaacaagtatatagtaggtgagtggagatagatgaaacagttggcaaaatgttgataattgttggaactggatgatagatacatggggatttattaatctccacattctatatgcttgaaattttttataaccagttaaaataaagttgaatgtactccaaaaagtgtgtgagtcagttggggagaggggttggctgcatagaaaaatagggaagaatcaaatggaaaacattttttcttatggttagaggaatttttgttttttaatgctggtagtgctcattttagtagtagtacttcctttattttctcatatgaaattccttcctccactttaaaattaaagttattttcacattttaatttcagatagaagtccctgattgcaagtgccactggtattcattgtaccacttaggttttgttaagaaacagaaacggaattactttactaaactgctttatgattacacagatagactctgggagtttgctagcaccttttattttaaattatgaacagggaaaaaacaataaagaaaataaatacaaaaatttagactttttaaaatgacttaagggagaagcaagtcacacaataagtttgagatgcagagcagcgaatcagaacaaatagctgcttacatgaacaaatcagtgggatgtgaaaatgcatcaccgtaacctacatttttttctaccaggagatttgcagctgactatcgggtgactcattcctatgcttagggggtgaggtaatgctattgtgaagggtgatgtcatctctgtacctgaactgcatgcatatattgcttctgtggctctcaaggaaaagctccatctgctttcacatatgcagcctgaaagacttgacaagattggcacaaaggtcagcagccatgtgtatgactcataagcaaccaattagcgaagagcagctatttaaaagtgaacttttaaaatcacaatccagaaatatgacatgatgattcattattgaatcataatgccttgttgttgttttgtgttttgcacttactgagttaatgctgttgagcatttaacttttaaaataaggaagttttctcagtatggtcaatgatatcaaatcttgaatctttaaactatatttttaattgaagataaggttggttggtcagtctgttggttgattggctggttttacttttggagttgcagagaccatccttagggcaaaaatggattctatttcatattagtttggcagttgatttttgcacttaggagacattgtattccctaaggacccgctactgctttagaggaaaagaggtttttaatggaagaggaaataagtcaaaataaacgctatctgtttactgcagacacacttaactcctcttcctcttttagtcatgcacacctgctttctctgtttatactttaacctaatactactgttgagatgaccaattaaaatatctatttttaactttattatttgaatctagtgttctggtaaataaaatatagaatatttaacataatatggaggtagataatggtaaatacttgattttctatctgatatgtaactcaaaatagaagatcatatcggctaaatactacttattgttattatagggtatgtgcatactctgacctaaatttgttctaatggcaacttcaagttggacattctacaaaagataaaaataaaggttttaatttttgagaataaaatttgttatctattatcaggaaatagaaggaaacaaagaataaaatagttatgctaagactctaaggtaatattaggtaaggtatataccagtgtcacttgagaacttactgaaaatcaaatgttttttcagtaatgagtaataggaacccttaaatgtctagaattatggtaaaccttcatttaatggtatggtcttgagtttgattatagagctcctgcaagactcttgagtacctttcttttgtttttaaactcttgtttggaaataatttcaaactacagacagttgtacaataaacgtggtaccaaaaaagaaaaaaaaaaaccttatgtgctcagactttacctaccccaacctggttgcctgctttatatgcttgcccgtgtcctcttgcccactctcactcttctcccccattccctcatacacacttgtttttcttgaaatatttgaggataagttaaatatgcatcatggccctttactcttaaatacatcagtgtatatttcctaatagagatattctcttacataactacaaaagttataagcattatcaatttatattaatacaatgccttaccatccatatgcaagttttgtcagttgacctaataatatcctttatagcatcctctatgcctagtacagcatctagtctagggtcagatattgcatttatttgtcacattagcctcttttaatctagttttttttttcacagccctttctttatctgacattgacatttttgaagaatatggtttctctgttatttttaaaatggaattttccttactttgtgcttgcctgatgtttctttgtgctgagattcaggttgtgcattcttggctggaatactacataggtgatgcagtctctctcagggcatctaactctcattgatgatttttacttttggttatccaatcaaggtattatctccactatgtaatatataacttttgttttttaatttcttgtaactaataagtactctgtaaggagacaccctagaacatgtagatattctgttcttcatcaaagtttccacctcagtttagcaccattgctgactctggtatgacccagtctttactgtgatggtggcaaaatgctaatttttccaactccagcccttccttttccctcatatattatttattttatctgtttgctattggtatgaacatgtgaattcctatttttaaaaattcagtacttaattattttggtgcttaattgtcccagatttggccagtggccctcacccttttcaagcacatccttgttttttgaaagaataagatggtaaaggctcatctcacatctacactgccccagccctggaatctgccatttctctgaggagccctggttccttttggtggagaatgaaattagataacaaaatttgggcaccgggtatgagtgcactacttttacagccactgtataaacataaatataaacattagctgacctggtaagtatttcttggaggtacagtgaacaatttttgaggatatcacggtgtctcggattatagtgacaacaaaaaggaaagttaaggaatgggaagatttttgtcactaaacttacattgccaaaattttcttagatttcaaagcaaaaaaatacatgatgctaggttgaaggctagataggatttctgtggacaaagttggtacagaaggatgttccagaaagaagaaatgacattgacaatgacataactgaacaatatcagtaactttaaatgttgtgtttaaataaccatgcctgatttccacccattgggggagaactaaaagacagggatgaaaggtttatttaaggtcagttttagaggactttgaatgtcctctaaaggattttggatctttaggatttggggtctttagtaagaagataatagctgttgaagatttttgaatagtgtcataacaagcttaactctgactgaaagagattaatctggaagatacatagaagattaaggaaatttccagttaagaactgtaaagaggctattatagtagttaaggcaggatttgaactggatttgaactggaaaataataaggatttgaactggaaaatgaaagaaagaagtgaattagaatagtggtttttaatctgtcttccaaaaccccaggtttggggcaaagtagatgtgtgagttgaacaccaaatgagaactctcagttactgtatgcgagttttcaagtaagtatccctttaaagaaagcaatctgctgcttaaagaacaaaaaactatgtagaaaaattttgttaactcttacttctctcgtattcctgtttcctaaagttttgagcctggataatcaggaaaataattgtgtcattaattgatgtaggtcaaattatgcgttttttaaatgccaaaggtcaatgtcacaaagacatgtactaaaactcttactgaagaaataagatattcttggccagaagtcttggaattatcctggactcctttcttttgctcatgccataaagagaatccaccatgaaatcctattggctttacctttcaattatatcccaaacctgactaccttaaacagctctactgcttatcaactaacctcttaccttctgcctgctctctctgcctccactcttgcctctcagcctgttcactttccttgtggtttttcaaacatgatgggtatgcttccatctaagagcctttgcaaagcctggcctggcgtggttaactctctcacgttaagactttgcccaaacgttactttctcagtggggtctaccctaagctctttattgataatcccctctccaccccatgcgtatttaccattctccctttatcttgttccatttttttaacggcatttatcacctaacataccatataatttacttatttattaagttgtttgtctcgtgacaccagagtttaaccttcacaaaggcagtgatttgtttgctttgctcgctaatctatcccaaccatcagaatgtgccaggccataggtaagcccttaataagcattgttaaaagaagggagggcaaccgagaacacaaaaccagtaagcttacttactaggcttctatctcattgcagatttgagaaagcaaatgaaagaagggatgggacactacttgaatcagtatctctaaacctgtgttccttggagctgagtctatgacagtaattggccttgataaaaatagccctagaaaatactgcatatattatctatttacacattaaatattcatattacacatattacacataatcatgttacacattaacatactaattgctataagagctcctatagtaacctcttcttgaactcacttgatcataaaactctcttttggtaactcacctaccattatgggacccttttggcccatggtaaactgagtttgagaaaaatcttactagagtactatgtgtagggcctgggagtgattggcagttcttttaaattacttttggttgatggactgcgctgcttcatgtgctactcagaaggaggctggagtacatcaggatcaagactccagctcttaattactattattcttttaaaggtatgatgcttctatttttctgggagaaataagaaaaaaataataattaatgttatggcccttttaaaaagttagcttctgttttaggtatttgggaataagatgatcattccttccctggatggagccctcttccagtgggaccgagaccgtgaaagcatggaaacagttcctttcacagttgaatcacttcttgaatcttcttataaatttggagatgatgttgttttggttggaggaaaatctctgactacatatggactcagtgcatatagtggaaaggtaagtgaaaatgctgaatttactttggggaaatcagagtaaattagggtagaaaaagtaatttattaaactacacttattattagttgagttttattgtaattttcccctgaggttgtcatttgttttaataagagaactgtgaggtaggaaggggaaactaataacagaataaatggcagagccaggaatagcaggaggaagagaattcataaatatggtctactgtgtctcaggtgtttttttttttttttttttttttgagacagagtctcactctgttgcccaggctgatctcagctcatggcaatcccccacccccaccccattccacaccccctcaggttcaagtgggttcaagcgattcttgtgcctcagcctcctgagtagctaggattacaggcacatgccaccatgcttggctaatttttgtattcttagtagagacagggttttactgtattgccaggctggtctccagcttctggccttaagggatctgcccacttcagcctcccaaagtgctgggattataagcaggagccaccatgcccagcctcaggttcttttttttatacattattttgcaatcttcacagtcttcctaagtgtaactttcgttttttttttttttttttttacattttgacagatgaagaaccttataaagattaatagtaatcctaatgataagaataattgatactactcatttatagggtttgatcctataataaggtgatccaagaggaaagtttatactcattttacagatgaagaaactgagactttaaaaggttcagaaacttccagggtcacatttaacttagatctatctgacaacaaagtcatgctgttaataatctagactttctccaacattagctcttaggatataatcataatataatctgcttctaagattgggtcttataaatccattatcaagagtagctaattaaaagcatcctttcaaccaggcaaggtggctcacacttgtaatcctaccactttgggaggccaaggtgggtggatcacttgaggccaggagttcgagaccagcctggccaacatggtgaaaccccatctctgctaaaaataaaaaaattagctggggatggtggcgcacgcacgcctgtagtcccagctagtcaggaggctgaggtacgagaatcacttgaacctgggaggtggaggttgcagtgagctgagatcacaccattgtgacgtgtaaacggtttatatacagacttggactaaaataaggaagaatagaaacgtggtctttttactcttgcatttttcaactttaacaattccttatctaagtgttaggcccatagcactttcttgctcttgcagatgcttttctgccttctccacccacctgcatctgcattgtgttgaggaggccatgccatcctatctggccgttttttgagcaaagcacttcaatctctgtttacttcggtagtctcatctgtaaacaacaggattgaacccgatcacctggttttccgatttgatgtgctgctacataattctggtattgtagaaggtatgcttttcgtgaggattttagtttggatcatattaactcttccttttttctttagtgaaaatttgaggcagttacttttgaatacaaaaagctctcagaaaagtttcaaatttttaaaaaccaaacacttttgttatacagaaactctaaggttgattttttttttaactcacctgaaattttattaatgatattgtagaaaagctatcacaagtagctatccatttcttcttgtatattctatggaaatctccaaagtaaggctaaaattatgtaaatccttaaaatcattccctgaaataaatattcattggtactgtcattgttctaaataactcattttaggagttggtaatctaactgatgcttcttatgacttgagtacttcatacacatttccttagtttcctttcactttttaaaaattacagattcctttaatatctctgatctattatgagttgtctccttttactaattttgtatctaattttgtcttttcaggtgaggtatatctgttcagctctgggttgtcgccaatgggatagtgacgaaatggaacaagaggaagacatcctgcttctacagcgtacccaaaaaactgttagagctgtcggacctcgcagtggcaatgagaagtgtgtattcagataatgttgctgttggtattatttagaaatacacctaataccaaaatttatcagatttctgtttgtggagattttgactattttgttgccttaaaagcatatatatatatatttttttgatacggagtcttgctctgtcgcccaggcttgagtacagtggcgtgatattggctcactgcaacctccacctcctgggttcaagcgaatctcctgcctctgcctcccgagtaccggggattacaggcacgtgccaccacacccaactaatttttgtatttttagtagagacggggtttcaccatgttggccaggctggtgtccaactcccgacgtcaggtgatccaatgtgggtcctaaaataaaaatggtttcatggttattaacaaattctgaactgaacttctcaccatatgcttcgggatatgataaccacaggggttctcatatgataactattagtttagtctcaggttaatgattttttttttttttttttgagaccgagtttcactcttgttgcccaggctggagtgcaatggcatgatcttagctcaccacaacagctgcctcccgggttcaagcaattctcctgcctcagcctcctgagtagctgggatgacaggcatgcgccaccatgcccggctaattttgtatttttagtagagatggggtttctccacgttggttaggctagtctcaaactcccaacctcaggtgatccacccacctcagactcccaaagtgctaggattacaggcatgagccacggtgcctggcctaatgatattttttatagcaatctcatcattcaaagttctttgaatacagaaagatgttaagacaaaattgatgtgtttctttgagcttgaacttatttgactctctaattatgtctagtaggtagtttcatagtttgattatctcaattttaaaataataatcatcttattcaattttcttgaagtattaaaacatttatttagcctaatacctttctgtttccttctttaaataatgaaccccttatgtaatttttatatttaaatatgtgattaaaaaatgtgatacctagattagatacgctgattctacatcaaatgcttgattttttttaaacctaatatttaagttttaaattgcctttgtagtaaaaataactttagattccatctttatcttttgaaaatgaaccagactttcgggttttgtctgatccgatgcagtgtaattcagtttcctttcctgaaaactgttttctcaaactcagttaagaatgcatttattctttctactttggactatgaatagggctttgcatttacagacaacttgaccttctttatcctgactggattttgtttttttaagtgtttgagtgcttactgggagctcagccaccatagcagcagatgtccaacttaacagatttttgagttaccagaataggaaggatctgggtttctaagatccatgattctttaaaatataattatttccataaatgtcagaattcttaactatgccattttatatctaagtgaaaagacacaatactctcagtagttgagtgatttttctatttactaattatagagggaacattattactgccactttaggataagactgctgaaacttacttaggaaagggtaaatgacttgccacatcttgttcagtggagatccaagattggggctgaggtatcctggatcacattgcctttttgaggccatgttttagtatgaatttaagactggtgcattcatcttgacttttacactggtttgttagggcatattaattttgctgcacttaatgaaatgtatcctgcctttaattaagaggtaaggcagactgtgtgctacctcattttaaggtgacattgatgtgtttggggaaaatcactctgatgtagaagtacaaacatttgtaagtttttgagagaaaatctgtcccttagctgttgtaagggacacatcaagtcagtccacaaccctcaaaaccattgtgtctgaagggtcaggacaaagttcttgtgggccctcttgtggcataaatcagtagagcactcttttccagaaggttatgttgttagttttctcatcacataattttagtatttgcttcttcaatctagaagagttctatattattttgtccctttctttaaatgtaaatttctaaaacacacctttgtaaatttaaggtggaatttcagtgttggccactttgaacttcggtatattccagacatggaaacgagagccggatttattgaaagcacctttaagcccaatgagaacacagaagagtctaaaattatttcagatgtggaagaacaggaagctgccataatggacatagtgataaaggtttcggttgctgactggaaagttatggcattcagtaagaagggaggacatctggaatgggagtaccaggtacctaacaccactgaggatttaaaatacggttcttcctctcccagtctgaccaaacttattgattgggtggaacgaaattactactacttggggctctcagcttgttctctgtgcttttataaatttgtgattttaaatggtattttatgggttggaactatataactactgcttgaattatttaagaccttttttccatttttgtttagttttgtactccaattgcatctgcctggttacttaaggatgggaaagtcattcccatcagtctttttgatgatacaagttatacatctaatgatgatgttttagaagatgaagaagacattgtagaagctgccagaggagccacagaaaacagtgtttacttgggtgagtaaatgtatcttatctaacgatagtacacattgacatctagattttcttcttacattgttccttcctacttcaggagtgcctgtagtagttttaaatcctaatatcatctctgatgtacgttgcccttgagatttatacttcgatttccattcctgctacttttccatttgtccaattctgaaaatttttttgttgttgttggagatggagtttcactcttgtcgcccaggctagagtgtgatggcatgatctctgctcactgcaacctccgcctcctgggttcaagcgattctcctgcctcagcctcctaagtagctgggattactggcacctgccaccatgcccagctaatttttgtatttttagtagagatgggatttcaccacattggccagaatatagtgcacctgacctcaggtgatccacccacctcggcctcccaaagtgctgggattacaggcatgagccaccacgcccagcccaattctgaaatttttaattactgtcgcatattctttttctctgaggtctatattagaaaggcttagaaatattctcattatataacatgatttcaaattactcattagccaagaatggtggcacgcacctgtaatcctagctactccagaggctgagatgggaggatcgcttgaccccaggagttagagcctaccccaaactataatcatgtcactgcactcctgcctgggtgacaggacaacactctgtctgtttatatatatataattatttataagtaattacatatatgtattacatatataattatttatatgtaattacatataaaatatatagttaggtatatatcctcaaagtctataattttctgtatttgtatttgcatccatattagtttgtgaccctcccctctttaagattagatttctttcttttttatcagtgcatctgtacaactgatctaaaaaataaaactctggtgtgcttctgggcaattgaaagcctttaatattataaattttgaaaactcttggatctaatttgaactagtctgcatcatcaaatactcataaaattctataagctctgacaatgtgccatccacctgttggtttgaatgaaaagcaagaatttgaaggaataacatgtcatttgtgttatgatagtatttaactgaattgttagcaatatttctagaattataggtgtttaggtaaactttcttgagaaagttacttagtgtaagctatttgttttgtgagagtacagtgacttatctttgaatttttctactggaacaattttcctgtattactgaaaatgtgctattattcagtgagaaatatcatatggaccttttgtgtaactttccctccctgtttttgttgaataaacattgagtttatctttgagtgcttcaagcatgtttcttctttgacaagagttttgtggtgtatgtagaaataactggaattaatgtaattttatttaattaaaaaaacctttttaaaaaaatcaatgcataattgacaatgttctggttgattcaggaannnnnnnnnnnnnnnnnnnntatatactttatattttattgataaaccatgatggtatttcagatgttaataatgaatttttattttcatttagagcatcatttcttggaagcagcagttgcttctaaaaaatgttaatcaaatatttctctatacaacttagaaaaactcttaatcattccctgaccatgccaaagtaacatttagcgcttaacatacttatattaagactgtttaggcaaaagttatctggttagcacatcatattctttgagactgaacgaatagaaatcaaatactgtgcacctacttctttcattatctttctaaaccttgtacgtgttttttactacatatgtcatgtcatattttaattgtttgtttaaacaactcagattctctgtaaaactgtgcttttcaaaggcaagagctctgggccatttgtttaacttatatgtttgaattgaattatggttgaatatcagtttattcaattaagcacgtgcatttttattcaagtcataacagttcagacttaagaaatattattattaagaaaataataattttcttttagattctccttccagaactcctgtcttggtaggatctgatgaatttgacaaatgtctcagtaatgataagttttctcatgaagaatatagtaatggtgcactttcaatcttgcagtatccatatggtaagtgaaaatactgagttttatttattttattttttaatttgaaattaatagaattcaaatgaagaaaagtcgattagagtatagacaataaaacatcttgggagacaatttcatgaatgattactaagcatacaagctccaaagttaggttgccagggttcagatcccatttttgccacatgctaggttgggcacatctaactcccctgtgtctcaatttctttatctgtaaaattagaataataatcctaatatctatgtattgagttgttgtgaggcctaaatgagataacgcaggcaaagtctcagttaacatcatacgtggcacatagtgtcagtaaacattggttctcgttattagctcttatttatcagactatattatgtaggctgtatagttgcctgtataatgaagaaaatgtgtttttcataaaactacatgaaaatgatgcacaatgaggttatcttcttactcagacaagagaaattagtgcaaaagtcaagaataggtgagatttggcatgaaatacattttctatttagtaagcagcagttttttgaagttaggatatattcagatatgaaagccttttaaacagttgtgtaattaagaagtcctcaaatctgtatcaggtaaacacgtagacgactcatcagttaccctagatgttagcactggaaagttattatataaattaaattgattaaaaaaaaatggctctgaactagaaacagcagcctttatcttttttttttttttttttttttttttttgagatggagtttcgctctgtcacccaggctggagtgcagtggcacaatctcggctcactacaacctccacctcctgggttcaagcgattcttctgcctcagcctcccgagtagctgggactacagatgcacgccaccacgcccagctaatttttgtatttttagtagagacggggtttcaccatattggccaggctgttctcgaactcctgaccttgtgatccacctgcctcggcctcccaaagtgtctggattacaggcgtgagccactgtgcccggctcctttatcttgatattgatcaaaagacaagttaggctgggagtggtggctcatgcctgtaatcccagcannnnnnnnnnnnnnnnnnnnnnnnnnnnnnnnnnnnnnnnnnnnnnnnnnnnnnnnnnnnnnnnnnnnnnnnnnnnnnnnnnnnnnnnnnnnnnnnnnnnnnnnnnnnnnnnnnnnnctggccaacatggtgaaaccccatctttactaaaaatacaaaaattagccaggcattgtggtacacatgtgtagtcccagctgctcaggaggctgaggcaggaggatcacctgagtccaggagacagaggttgcagtgaggcaagatcactgcactccagcctgggcaacagagcaagaccctgtctcaaaaaaaaaaaaaaaaaaaggcaagataaaagagaactgtgtagtctgaccacgtagtacaaaatagaagacaaaaaaagacaagctatttttctgggacaaactcattttgacagcctaaactgaaccaaacagcatggatgttttcctttcattttgtgaagaatgattggtggtaaaatttggtattttattgataactaaacaaaaagaaagctaaaaataccctgaaggaagattgagtattaattcttatatttaaagaattgaattattaatgaggttatgaatggagtagcccttaagatttttttctagtcttattacttaatataaagaaaatttaatatgcttataggataaaggaaaatgtctatatttacgggagaaaaatgagacaaattaagatgtttaaaatacgttaaagaagagagacaaaacttaaaaggaattaatgtgataagtcacaggaaaatggataaattttaatagttaaagacgggcctatttttgattacctttaaaaaaaacgttttaatgtttctatttgaagataatggttattatctaccatactacaagagggagaggaacaaacgaagcacacagattacagtcagattcctcgacaacccacattacaacaagaatatccgcaaaaaggatcctgttcttcttttacactggtggaaagaaatagttgcaacgattttgttttgtatcatagcaacaacgtttattgtgcgcaggcttttccatcctcatcctcacagggtaagaatcatggttgcttactgtctggtttccacttccccacctcctatttgcttctcaacccatcacagtctggcttccatccctactgctccaccaaagctactcttgccaaagttctcagtgatcttccttgtgttaaatgtaatggacatttttcagtccttatctaactgaacctctttgtatttgacactgttgaacatctccctttgacctttcttgcctgacttccttgacaccatgctctcctggtctccttgggtgtgatgtggatgcttcaggacctgatctttctcatcctctcagtattgttggtattcctcagcactccctcttttcactgttcatcccacaaactctccttagatggtcttccctactttcccagctccaatcttcttatatactaatggttcccaaatctgtttctctggaacagctatctagtaagtgctacacaggcacttcaaatgagccatatctcagactgtcctcatttcccctcccattcccctcccctccccagcctgttctagcatttttctctctcaaagaaacgtactgccgtatgcagtcacgaaagccatgaaatcattttgctctcccttatcagtcaccaagttctgtcgaatccttcctcctagatatcttcacatttttcttcttctctatgtgtcagttttcatttccacagcacaaataccatcatcacacctctcctgaatcactgaaataacttctaactggcctctgtgcccctagtcctcaggctatctccagtccattctccacaccctaactctagctgcatttctgggcttaaaaacctctaatacctgaccctcctccccattgttaggctcaagtccaaccttcttaaaacatgcaaggttctgaatgattcgtaccctgcctgcacgtgacccatccttcactggtaccctaatcccttcctcccctccaccgtgctcagccactaggctgagctgctttcagtccttcctgtagaccgtgctctcgcttagcctggtggtgctcatccctctaacctcgccttggaaccttgttccttacctcctctcccttccctctcaaataattaactcctgggtaatatcttttagtttgaaattagttgccacgtcccctgggaagtcttctttaacctcttatttctgagttagatttcctgcctatgtctacactctgtactcctcttactagagtatttactaaaatatttaataggtaattcctaatttctctctctacctctagactgtacattctttttttttttttttttttttcagagacagggtctcactcatctcactctgtcacccaagctggaatgcagtggcaccatctcagctcactgcaacctccgcctcctgggttcaagcaattcttgttcttcagcctcccgagtagctgggactattggcatataccaccacacccagctaatttttgtattttttgtagagatggggtttcattatgttggtcaggctggtctggaactcctggcctcaagtgatctgcccacctcagctttccaaagtgttgggattacaggcatgagccaccacgcctggcctagactgtacattcttaaggacaagaaccagtctacactgtttaccaccatctcctcagccccttacacagtgcttggcacataattggagctcagtaaagatttgttgaaagaatcagtgactaaacaggtgacccacagtgccccaatttgaccatgataattattaacatcctctaaaacatcttttaggagatgttggtaaagaggcattgcctgatttaatttcctgttcttaaaagcattttaatgcaatctatgaaactggttaggaaggaaatctctctagtctttttgttgttgttgttattgttactgggttttttgtttgtttgctttttttccctaccttattttgtcaaaagaaatcactctagtcttgcccaggagtttgtgtttatgcttacatgtgtgcattgtctttctatctagttatgtatcatgctgtacatatgacatacccacattataaagaaacaaaatcccctcaaagactggagggatagcagtgggaagataaactttttttcttttataataaagcaaaatgctgcactttgttttcataatgcttttatttttcttgatgctacttatgtatttttcagtgttgtttattttataacctaaaattgttagctaacttcagttcagctttgtactggtagtgattttgtttttcaccttatcagcaaaggaaggagtctgaaactcagtgtcaaactgaaaataaatatgattctgtaagtggtgaagccaatgacagtagctggaatgacataaaaaactctggatatatatcacggtaagagtcttataaaatacaaccatctgaatcaaagaagaaatgacctaagatcttgtttaactttttttttaatgtgtggatatctagaaaaataaaacataggcttaaccctcaataaataaataaattcaggtaacttaaatgtattaaaagtggtatataccctaagaaagataaaaatagagtgttataggaatttagaatttcagctaccaaattaagttcttattcaagtaacttagttatttagggtctactatgtactaggattagcatttatagtaccagataataattaggtttataagagtgtgatatgagtctccacgtttcggaatcctcatttattttcattattgttctatctgtaataggaagtagaaatatagggaaaaaaacactaatagaacagatagtttttaaaagcagaagggggagatggattagctaaaagtaggcagtttaaataaaagtaaagaagctattagcaatctctcaagtataaaatgtcacctttgatgcattgtgataactggaaatggtgttatggtttatttttcatattacatggattatacctatttttctctttgtcttgatagcatacttcttatcactttagtgatatggggacaaggaaaagacgtggaactatactgcttaatatctagggtaatgattttatggcagaaaagattgaaaataatagataaatatgtatattggggccctccaaggaaacagaaatgacaagatgtgcatatatatcttatacataggcatatatctttatatatatacttctatatagatatagatgcacaagcatattcacaacaaattaaggaaatacttgtgacaattacagttctcatttttgatacctgtcatgtggtcacagctggtagttataagtaccttcctcctctatccatcccatattccctttcccattggagaacaacacctcagccggttgtaattctatatctggtagggtgacccaaatccacagtcctgaagggtctgggagattggtagttctgcctggattggattgttgtagttttccattgaccttaatcacaaggcatgattatacaaagagatccctaagggatctcatgtatttcagacctactctttcttacacctccactgtgaaacagcaatccaatttccccttagtagtcaggattagtcatccagccagcacagtagctgtcttctttgttgattggaaggcatgaggagttcaaagttgctgttgtatctcctggtggaagtgttcctctcccttagacaaagacctctaggcctgccgaacataaggtcacaggaacaggaagcaaaaatgttgccagtggatcactaggtggtaatggtgggtgatgccactcgcatttccatcccttgatccctggacctgtaaatactggctatgggagaaaccatgctataatatattagacactgattcagagcatatccagctttctggagaaccctggcccagccctgcaaggtacctacctggcagtgtaatggagtcttaaaaggccattctacctttctgtcaaaccagctgcttcaggatggtggggaacaggtaaaaacagtcaatttcataaacaaagcaaaatttactaggtgattaacaaatgctaaaggctactttaatacctttgctaataaaaatactaatatatcagtgactgtcaacaccagcaggcagtgagagaaagaataaaggatccaacaactcccatgaggtagtctactactgaagttattcactgttcattaaacatttattcggaacagctgtgtgcaggacaatatttcaggctttgggagaaataaaaagactgctcctatcctggagaagcttaaagtctatgggaaagatactactgggtaaaacaagcatgtaagaagaaagccatgaaccaaatcactaaatctgtttgtgatgatctaggaggacatcataaatgaagtcatatttgaactgaattttaaattgtgagagttcggcaagtagagatgaggtttggggagtagaataaatgcggtatcatgaataaagatgtatttgtcaggcttttgtcaagaaaattagaaaaatatactcaaaattgaattagacttaagtcagtttaactttattcaatatgaagaatgcagctcttgggtcttttttttttttttttaatatgggagttctataataatacctaatgttttttagtggcgacaatgtcctaggcactgttaagaacatgaactctgcattcagtcatgagttcaaatctcagctctgttatttatcagctgacaacttaggcaagatgatacttacatttctagggtctgtaatcacatataagatgttactctttttagaagataatccgtttttatataggtgttttccttaatatgggaagataattcagctggccctccaggagtaggatatgaagtttgtgggcttttgcatttggggagactgatttgtactgaggtaccttgactggctatttttaggaatacagattattactcttcattttctatgaaaggaattggcccatggaacgttgaaatctattgcttctccttaactccatgctttaaccagctgaggcaactactaaataaatgagtatgtaagtcataatgtaagtcttaaagtaaataatgagtatgtaagtcataaacttacccttataagggatatcagacatcatctaatttattcattaattcatgcatttattcaacagacatttgttagactttcggtttgtcaggtagtgcccacccattggaaatacaaagagaaacaagaatgattttctgcattcatggcccccaaaatacagtggcggtgggagaagggagctgcttacacataattgcaaaaaattaagattaagtttaaatacttcaaagtattatgtgcagagtgttatgggaatgtcaagacaggggtctaagaaagccttacagaggtgaggagatgagcagaatgaaagaagaatagggttcattaaatgcaaagaggaaggccatcccagtggagcagacagcagaagcaaaaccttgaattgtgagacagcatggtgcaaattgactggatgatacagtgcaggtcagtgaagtcagcactaaagggagaaacaggctgcttagtggaggcccctgtgagtgacagatggtgagttggcttctgtttgacttggtacctccagtggtaggtacactgactcgtggggcaacccaacccatgtcagctttggttcctaggaaggtttatggctaaaatagtacctgggtataataggactgattaaaattttcccataaaattgacaggtaattagctaagataaaaacacattttctgtaattgattacaaaatgtcacagaatgtaaaagatatgaggattaggaatatgatattttggtagatgataggaagtattggacagcacacatcactagtgcagcagttgtaagaaaaagtgattaacaagtgattcccaattaaacatgtcttttttatttttaatttttttctaggaaacataagaatgtgtttgcttcatttatacaaacaggactaaaaatgctgttaatcaaattcaaaatatactatttattaagatgagttctatgagtttatacatttttatgtgtcataagattgaactgattttcacattaccacaaaatttaaaactgttgcaaacctttataaattttatctctttttaaagatatctaactgattttgagccaattcaatgcctgggacgtggtggctttggagttgtttttgaagctaaaaacaaagtagatgactgcaattatgctatcaagaggatccgtctccccaataggtaatgggtggtaccttcagtaaacttgaaatcagcacagtgtgatctaatctcatgggtaaaatatccttcttactgtactctgtaaacaccatagaaaacagtttcagacgtttcaaatcttaggttctaagtgctgccaattaaccagctgtctaaaagttgttatctctataggttgctttctatctacttttaaaatatgcccttgttttttattattaactcaggactttcgtttagtggcttataataactgtagaccagtaaattgcagcattttaaaacattctatatttttgtataaataaggaaaagtactagaacaaaaacatttgaattatattgtctctacctggtaataactattaacactttagagtatttccttttgattttgttttctggtcatatatttacctaactggtagccagttgccagtactgtacagttttgtctgttgctttcttcatcatatcctctatatttttcatgttattaagaatatgttattagaatcctaaaatatattaaaagtattttatggcttggtaatagtccatttaatacacgtgccatattttgtttaaccatttcttattgttaaacaatttggtttctaatttgttagaattagaaataactttaccataaaaaaaacctttgcagtattcatctttttatgtaccttttgacaatatctatttccttaggatagattcctagaagtgtgatttctggctcagaacagtgtgatgcttaagatgatagggttccagcaataccttttattctaactatgtagaaggcccttgttgcttttttttttttttttgagacagggtcttgcaccgtcacccaggctggagtgcaatggcacaatctcggctctctgcaacctctgcctccctggttcaagtgattctcatgcctcagcctcccgagtagctgggattacagacacccaccaccacacccagctaattttgtatttttagtagagatggggtttcactatgttggccaggctggtctcaaactcctgacctcaggtgatccacccacctgcctcccaaagtgctgggattacaggcatgcaccaccacactcggctaatttttgtatttttagtagagacagtgtttcaccgtgttggccaggctggtctcgaactcctgacctcaaatgatccacccgtcttgccctcccgaagtgctgggattgcaggcatgagccactgtgcctggcctcttgttgattcttgattaaatgcacactaattgttgtgctgtcatcatatctggtagtcacagctttttcaaattcctgtctggtaggtacaggaattggatggtttgggtactagggaactattttttttcttttggtaaataacttttgagtagtttaaatattcatatgtgccaggcactacataagtgataaaaactgagcaaggtttctgccctcaagaagcctgtacctttttggtgcttctgtatgtacactcaagtaaatacaatgcaagaaagattttgacctttgccttatcttagtaaatattaatagcttctcatgaagaagagcagatgtggccaaaaggcagtcaaggaagtcaagcttcttagaaatggcggcatttgctctgggtgctcaagagtagcctttccctcagtaggagacaggtggggagggatggccaagtgcatgaaatggcccgagcaaaggctctcacaagcacttggaggtggtatggagaatggtgagagttctggagtagatggaacaaagggtaagaataggggaggatggaagagaggaagaaaaagataggttggccaggtacagtggctcacgcttgtaatcccagcactgtgggagtcctaggcgggtggatcatttgaggccaggagttcgagaccagcctgaccaacatgacaaaatctcatctctactaaaaggcagttggaggttacagtgagctgagatcgcatcactgtactccagcgtgggtgacagagtgagaccctgtctcaggaaaaaaaaaaaaaaagatagcttgtagcaccttaaatgccaagcaaagaagttgggattttaaaactttatttgtacgtgcagtagatgcgcttgtagcatttatttccagaagagaaaaacaaacaaaactgaaatacttgtattttttaaaatacaggacttgtgtggccttttagaagtataccctaggctagccgggcacggtggctcacacttgtaatcccagcactttgggaggccaaggcaggtggatcacctgaggttaggagttcgagactagcctgaccaacatggtgaaaccctgtctctaccaaaaacacaaaattacctgggtgtggtggtgcgcatctgtaatcccagctactcgggaggctgaggcatgagaatcacttgaaccagggaggcggaggttgcagagagccgagattgcgccactgcactccagcctgggtgacagagcaagaccctgtctcaaaaaaaaaaaaaagtataacctaggctaactcatctgtttctaattttagtttcaagaaaagatcctattttattatttttctgttttcactattagatatgaatacttcagatatgaacagccttcagtgttgtcttactttctctctttttcaggctaattttatttctttaattttccttttttattggtatataatacatctacatattttaggggtataagtcatataatttgtaaagatcaaatcagtgtaattggaatatccatcaccttaaatattttctctctttcagggaattggctcgggaaaaggtaatgcgagaagttaaagccttagccaagcttgaacacccgggcattgttagatatttcaatgcctggctcgaagcaccaccagagaagtggcaagaaaagatggatgaaatttggctgaaagatgaaaggtaactaactttgttacacatacacttaagctagttttttgcttgtgtgattacaatgtcagttttataactttagggatttttttttttaaagaaaaggaacagcagagttctgttgtttcatgttttgaaaagttctctagccacttgtgaaattttggtttagattttgagaacatacacgggtgactcatgcctgtaatcccagcactttgggaggccgaggtgggaagatggcttgagcccaggagttcaagaccaacctgagcaacatagtgagaccctgtctcttagaaaaaataagagagaacttacattttaaaaaattactagttgataggactctatacattgtgattgattgagggatttatagtgacttttctcagtataaggtatctgcttctgtctccattttttaaaaatgtttgttatttagttctcttagcagttaacaatttacagctcctttttaagtagttttgaactatttgcagttaaaaatacataaacttagcctgaatatattgtccatattaactatgatgtgctataggaaggaaggccctttaaaaactattaaaggagaagaaaaaggaagcatgtgtagatagactgccaccaaacaactggagtgaaactcctacctacaggtatctaagcaacattagatccacgtgaggtaccttgttaaagtggtgcttattatagactcaaccaataactaagccatagaaggaccaagtgaagtggccccatgtctcaaggccttgtgaggcgctgcccttttaggttaattttaagccaccaaggaatcctgtcctcactttgcataaaaggctttggctgctctggcagccccagacagtcccaggtaactgtttcatgtataaaattaagctttaaaattaagttttttagaaggaatgaatggaatgtgatgttctgtatctcacattgcatgtttttatttagtttgtatgttgttttgttgtcatttggtaagtggccttattacagttgaagctttttaaacagagggtgcagttcaggtacttgaatcaatatatattcactcttacccctttgtatttctcccacttttagcacagactggccactcagctctcctagcccaatggatgcaccatcagttaaaatacgcagaatggatcctttctctacaaaagaacatattgaaatcatagctccttcaccacaaagaagcaggtctttttcagtagggatttcctgtgaccagacaagttcatctgagagccagttctcaccactggaattctcaggaatggaccatgaggacatcagtgagtcagtggatgcagcatacaacctccaggacagttgccttacagactgtgatgtggaagatgggactatggatggcaatgatgaggggcactcctttgaactttgtccttctgaagcttctccttatgtaaggtcaagggagagaacctcctcttcaatagtatttgaagattctggctgtgataatgcttccagtaaagaagagccgaaaactaatcgattgcatattggcaaccattgtgctaataaactaactgctttcaagcccaccagtagcaaatcttcttctgaagctacattgtctatttctcctccaagaccaaccactttaagtttagatctcactaaaaacaccacagaaaaactccagcccagttcaccaaaggtgtatctttacattcaaatgcagctgtgcagaaaagaaaacctcaaagactggatgaatggacgatgtaccatagaggagagagagaggagcgtgtgtctgcacatcttcctgcagatcgcagaggcagtggagtttcttcacagtaaaggactgatgcacagggacctcaaggtctgtatttgtggagcatcacccttggggtttcaatctgacgttttgtgattcagagcagtacttgcagtactctgaaggatccttaagagttggggagagtaaaagcatctgagagcagaggtctgagaaagtagcctcgaaggggcctgctgcaagaataagaagtcttatgtctgaaaactttaggcaaaccatgcattcattgtcttcagtaatgtgtttgtgttcattttactgtaaaaggtattctcagtagtccaggtgagggaaaaaaaagaaaaaagaatctttaggtaaaatccaccatgagcagatatagcctgtttttttgtttgtttgtttgtttttgtttttctatggttttgagtaaccctgacaccaatacctccagggctctgaagcagcatggtgaaagggatccgaatggaaggagagacatgggttccttcattagccagcttgaattggggcaaatctccacacttttgcttctttttctgaactgtttagactttgggggaaggggtaagaagccgaatggggaaaggtagcaaatagttaacagatgactgtttacagctctaaaaccttggattctattttcaatatattcagtagtgaattttgcagtaatataatatgcaaaattattaaagagtcttactaaaacatgacatttccgtagtagtgtttctaaaaataagtacatggaacttttatttaactaatttcccacattccatatactcttagccatcaccagtagatgtggagtgaatgtataaatacttttctgatgaaagtagcttaaagtcttgatagatgtggatccattttaagtcttttcagacttaaaacagacttgtttcaggcacaaaagtagctatttggacacaagttattttcttctaaaatcagcagtaggttttcaaattcttgggtatattttaagagttttagggtaacaagaataggaattagaaataattcttattttttaatataattgttatttagtcatataaatcattatgcttcagtgattttgacgtgggcccaaactgattgccaagaattgttctgcactgaatgaaaagttcagagatgaattatttggttggattggagaagacagtttacaggagaccacacacccctaatttgagagaatactagcagttaggtttgaatatagtaaacgcttatcactaggtgggaaacagctagctgaaatacacattcttcttgtacttaacacttgctgtacacacaaatgccaacttgaaagacaatgaatcatgttttcactaataatgaatattcttctgctaattttataatgtaaatgagatattggtaaatatccatttaatgctacaatgttgtctaaagatttttctgtaattgtctatgcaccagaaaaattgcaagaagaaagttaatattcctgttagtttttctagaaatcagaaagttttattcctttctaaatagaagacaattccttttaaagatttctagtgcgccacccccaaccaaaaaaaaaaaaaaagccaagatttttgttcctgggtgaaaaagctgtacattttgctacgttctgacctaaatctttgagctcaatgttaaaccttctaggccctctccccctgttatattttggtcacatttttgtcttcaggactttggctcctgcctcttcagactaacttctagtcttctattttctccactctgaacttttctcagttcctcttgatatacactgttctgacagaaacctggtccttcttcattattctcatcacacctggattatttattctgtggtttctatggggtatgaaccatatctgtttcttttacctgttatagtctcagtacaatgcctgaatgttctagatggtcataccatttattttgaattttattttctttgcactcaaaagtgtttatactgacttaaccagaaaaggaaatctgttggcccacatggctaaactgttgagaattcaggtaaagctttagctgagatcaagtgatttagccagaacctggtttctgtcctccccatttcttgtttctatttaagtcttttggagttggtggggtagagggtggagagaaaagtattgctttttcccactatcagaaattttattctacttaaaccaaggacacctacccatccctcaacaatccctagccaggcaatgggattccatggattggcgtaagcaacttttagagcatggatgccttccacactaaccgtggggttttgctgcacagtcagcaagaaggaagttcccaaagtaaagtcaagatacttctgctggaagcacagggagatagatactggagagccaaaaagcttgtctattatagggttcagtaaataacaactgccatcagatgttgggagttgggaagaaagatgacatttaatgcaggatagtctattattgcctctggtacaaagttatttattggagagctgcagattattaccatagatcttatacacaataacttcatgcttccaagtcaaaatcgtttaatggtattttagagtttgggaatgcaatgttattttctggcagtatttgaaacatgatgaaattcaatttcatgagctaaatggcttcctttttcctcatttcaagggctatgaatggtggtcatattacccgcagagtagagtannnnnnnnnnnnnnnnnnnnnnnnnnnnnnnnnnnnnnnnnnnnnnnnnnnnnnnnnnnnnnnnnnnnnnnnnnnnnnnnnnnnnnnnnnnnnnnnnnnnnnnnnnnnnnnnnnnnnnnnnnnnnnnnnnnnnnnnnnnnnnnnnnnngagtagatatagtcttgagaacatagaaggttttacgagaggcagcatagagtagtagtgaagagctcttatcccttctgataatctatatccccctcagacgcaaaccaaaaagatcagtctgtttcattcattcaccaaatagtaattagctaccatagagcaagaactggactgaaatctgggcacgtggcagtggatcacaaggtcctttcctcatagagccagactgctcaggtctgaatccctgcttcaccacttgctagttgggtaaccttgggcaatttgtttaacttctgggcctcactttctatgtctgtaaaatggggttagtactcatctaatggggttgtagtacatgagttagtagtagtaaactgctttgaacagtgcctagcacattgcaagttctatttatgaactagttattattagttataattattaaggctttaagtcataagtgtagagatgcttgcctgggaagaatatatagaataataagattgaggattaagtaccatgatccctagggaatgtgcacctcaaagggtttaagtagatgttcaataaatactagcactctttgctacccttcccttttctttactagcagtacttgtctggcacagaaaaattgtcactattttcctgttagcccattttaaaaagaaatatgcttgaaaatatctagtttgttgtattttttctttgtagtcatttaaataattctctttactttttcgcctccatgcacacccactgtacttttgtctgttgtattctttccagccatccaacatattctttacaatggatgatgtggtcaaggttggagactttgggttagtgactgcaatggaccaggatgaggaagagcagacggttctgaccccaatgccagcttatgccagacacacaggacaagtagggaccaaactgtatatgagcccagagcaggtgagtttttcagacctttacttactagcacagcagcagatgtacctgatgaatctcttctcatgttttcattaaaatacccagtaatctaaaacccagtaagtctgaaaattatgaaaactggcagtagtgttccagtagtggaatagtgacacagctaagatgtagtttctacaacctgaattggggctggattaagaaaaatacaacacataaaatgcactcaccccctgaacaagcacctgacagcaaccaggaatttggaaagagactttgaatgccaccctcccaaacttaactcgtttgccttgtgtagactgtgttggaactgttttcagagccagctagacccagaggtactatactgagctgccctttgtggtcactcataggcaacttccagcatgtaccacagtaggaaatagaggcacacaggccggcaggtgttgccttgtgggctgcttggccttcacaggaaaagcactgtaatcagggcagggactggaagagctgggggagcagggcatcctggaagcatcaggcgagcatgctcagccaccaccaggcaaatgatcttcacaagcttctctatgcttagagcagcgggtctcggacgttttgggctcagtacatacttacacttgtagaaataactgagaacccaaaaggttttcttaacaaaattttatctatcgatatttgttatattagaagttaaaagagaaatttataaaactttattaaatcaactaaataacaatgaaacctatcacatcttaagatatttttatgaaaaataagtattttctaaaacaaaaaaaaattacaggcaccaattcccctgcaaaaaaaaaaaattagagtgacatttgtttacatttttgccagtctctttaaagctaacttataaaagtgctacattcttctatctgcttttgtgttcaatctgttgcagtatgttattttggctgaagtacatgaggaaatctggcctcgcacagatatgtagttggaaaaaagagcaatatttcatttcaagtaattgtagatattttgtctttgatagtatatcaaaacttagtaaatgatagtttcttagaagtcatttacactgtggaatctaaaaccattcatgaatattttgtactctggtacttttaacatcccttggtccattttgtactttgaatggatctttttacccatgcttgactttacattgtgcattagtcatttggaaactattggttccctaagtttggcaactattccaaaagtcatcacagttcattatgtaatataaaaagtcactttggttaatacaaccaccaatctcaccagaaaaggctttatgtacatattaggaggctatcaaattcccactggtagactgaaatcttccaaaattttaattttcacttaaaagctcaacttttaacattggcaacaaatactgttagttttccttgaaatgccattctcacattgttcatctttttttctctttaaaaaaaaaatgttgtttgtttttttttttgagatggggtcttgctgtgttacccagactagttttgaacttctggccgcaagccatccttgaacctcagcctcccaaagtgctgggatcacaggcgtgagctaccatgcccggtctcattgttcatctttaagaaagtgtccctcggccagtcgcagtggctcacacctataatcccagcactttgggaggccgaggcaggcagattacctgaggccaggagttcgagaccagcatggccaacatggtgaaaccccgtctcttgtaaaaacacaaaaattagctgggcatagtaacgcatgcctgtagtcccagctacccaggaggctgaggcacaagaattgcttgaacttaggaggcagaggttgcagtgagccgagattgcaccactgcacttcagcctgggtgacagagcaagactccatctcgaaaaaaaaactctctgtcaagtatccaagtctcaataactgtagtttgtctaccaattattctttcaagtcaaaatggtgttctatgaaaagagcagctagagcatattgtaactcaaataattgcacaaatgctaatgatactcacaagctaatctatgcttacatcagcaggtctcaacttcttaaaattagtttgttttttaaattgactcataattgtacatatttatggggtacatactgtcgttttaatacatacactatttagtgattggatcagggttattagcatatccaaggtatcaaacttggagacaactattgtactttggtatggagcataaatgtttttctgaatattttccattttgtcagattattaaaaaggtgtatatttaaaggttgagatttaataaattaataatttctactgctaaggacattttaagtgaaatgttttttggttttgcctgtgagcacgtggtgctgaagaatgtaattgctactggtacagcttggcactgctcgcttgattcatgcttaggttctgtcagtgcaaatgtcaacacagtgaaaaattatatcttagtattattatgaaaatagtcttggccttgcagaccttttgaaagggtgttagggtcccgaggaatccatggaccatacttcaagaaccactggatttgactatctttgaaagattatatcagagaccagtaataggaactgcctttgaggagggcaagtttgttttactgtcatagagcatccttttgaagtgtttgcattgtttaccttagtcaagtgtttcttttttgcaatgtgaatttttattttgtatttcgtctttgaaggagattgcagtgagccaagatcctgccactgcactccagcctgggcaacagagcaagactctgtctcaaaaaaaagaaaaaagaaatcaagcatttttacatattaagagtcaaaaaagtatcttaagtgaaaaaaaacaaaatgcagaaatgtgtacaccttttgtgtaaaggaggaaaagatagatatacatttgcttatgtttacattaaaaaactctggaatgatgtgtaagaaacaaatggctatgggggcagtggcagaggggaagtaactggtggggctaggccagtgagggacagagtgagagggaacttttactgttagctctttttgagccatctgaatgtgttacctattaaaagttaatttgagatgagaaatatataaaaattggcaatagacatcaaacccaatgaacgatatgtgccaatggttcttgtgaatattgataccaaaatgagaataaaatccaaaatgtattcctagtaaaagacaaataattttaagtatgcttatcattataagctgagtttgtcattcctatattaaattaacaaagattaggaaatggacgatggtaagaacatggaaaataaagatgggaatagggatttgtacttgatgtagctaagtttggcaaatagaataataaaacaatatttctacctctgtatcacttacagacgacaaacacaaactgcagcaaagggaaaggatatggaaatacaagtgatgctaaagccaaatattagttatgacaacaaataaatagatgtgtttaaatatccccatgaaagggaaacttcaggttggattataatttaaaaaaaaaaaggttagaaagggaagctaggtaaaaaaatactaagctttatatacagttgctatttgaagatttattgatgaataaattataattatatttactttcattttgaacttctaggccacaaagaaatatcatggatattgtaaatgcctttttatgattataatatattaaaagaagggtatagtggtgtataaattgatttttataattttgtctgtttttatttttgcttttgcttctgttttgctggctggaaattttattatttttttgagacagggtctttgtcactcaggctggagtatagtcatgtgatcttggctcactgtagcctctgcctcctgggctcaagtgatcctcccacctcagccttccaagtagctgggattacaggtccacaccgccatgctcagataatttttttgttttttgtggagatgaggtgtcactatgttgccaaggctggtcttgaactcttgggatcaagcaatcctcccgccttggcctcccaaagtgctaggattacaggcgtgagccactgtgcctggccaactggaaattttaaaaccctcctaaataactatcaggtcaatagatgatgggttgataagtgcagcaaaccaccatggcacacgtttacctgtgtaacagacctgcacgtcctacacatgtaccccagaacttaaaaaaaaaaagagtttttaaaaataactatcaggtcaataatgaagtaaaaatactcatacaaagtattaagaaaatgatgaaagaagctgggcactgtggcttgagcctataatctcagctactcaggagggtgaggtgagaggatcacttgagtccaggagttccaggccagcctgggcaaaatagaccccatcttaaaagaaaatgtaaaaaactttttttaaaaatgaaagaaatgaaaaatagtgaaatctataggaagttttcaaagttccatttggagataaatttattttcaggccttcattacatagcacattactgtataagagattagaattctgctcaatagaaggcagggaggagccaagaagatggaaaacaaacataagaattgatactggtgaaacagtaaaatagcatcaccatggttgtttctaatagtttaaaataaagataatcctctctagcatagatacctacttaaggggggaaaatcacaaataaatttagaaattagaagagatacagaagagatttttatttataggagactttcatatatagtcaattggttgcaaccaaaagtatccaaactggcttacgtagaaaaataaataaaataaatctattggccctggtaattaaatcatcctgctcaaatgatctggccaaggggtggtgaaaggaaaaattaaaactgtatgaaatatcaaaatactataaatacatatttctatctataggaaaaaagactagaagagccataaaatatcaacagtcattgcttctgagtagtgggacttcaaatgaattttaatctattttggacttttctgtatgatccaatttttctacatagtcatacaacagaattgatattaaaaacagttttggttgggcatggtggctcatgcctgtaatcccagcactttgggacaggtggattgcttgagcttcagagttcgagaccggcctgggcaacatggcgaaaccccatctctacaaaaaatacaaaaattagctgggcatggtggtgtatgcctgtggtcccagctacttgagagactgaagtagaaaggatcgcttgaggctgggaggtggaggttgcagtgagccaaggtcatgccaccgtgctccagcctgggtgacagagtgaaacccctttaaaaaaaaaaaaaaaaagtttttttggccaggcatggtggctgacacctgtaatcccagcactttgggaagccaaagcaggcagatcatctgaggtcaggagttcgagaccagcctggccatcatggtgaaaccccgtctctactgaaaatataaaaattaccgggcatgatggcaggcacctgtaatcccagctacttgggaggctgaggcaggagaattgcttgaacccaggagggggaggttgcagtgagccgacatcttgccattgcactccagcctgggcaacaagagtgaaactccgtctcaaaaaaaaaaaaaaacacctttttaattgtgtttttaaaaatttattattatttaagaggctggaaataatacttttacattttaaatattgtgaaaacaaataaaaggaattctatctggatgcttattaatgaaggctcacgacttgggaagcctctctcacccagtcctatttaaaagagatgcttctcccttcactccctgcctgggtccatcccattacactggtttctttttacagcatttttaactctttgaggttcttttttctttccctgtgaaatataaactatcagtatagggacttagcttgtctctcattctactcttaacacctgaaacaacacctagaatgtggcatagtttcataagtgtttggtggatgagtgaaggtgaatgctagtgaaaagatgaacaccaggtagtcccggccaccccatacacacttctgtgctgactgtagtgtggcttgtggctgctgtgtgtgtgtgtgtgtgtgtcttggaaatgggttgccatttgagaaaggaagaggttgatgacaactgaagctatatttcgtattgttgaaaatactagaaaattaggatagctgtagaaattttatggcaatgtatagtggttaaaatttggtagttaaaaatggacagtcttaattatcttcttaatcctctttaaacatagaaactgtcactttataaagtgctccttaaaaagtcacacaaaatatttgggctgtatgaattgtacaatcttacccaagccttagaagctatactaaaacattgttttaaaattatttattattagaactctcttaattttctcatccttgaaataaatgagcaggacccatggttactttgttcttggttgtaattacgaagaaacacaggttaagttctagatttgcacacagcgattaaacaattcaaaggatatattctaggtcctaattccttattttttagatattttgtaaatataacttttcatgcgttcatgaggctacatttctttttttaaatatgtttaatcacgttagaaacaataaataaatttagtaacacattatatatctatctgtcctctagggaatacagaaagtatagggacatataacaaaaaagtaaaaatcacttaccaaaaatatctgtaagacattaacagcagttatttccttttctctctctctgtgtgtgtatatctatatacaccttactttagaaaataaaattggaattctactctaacattttggatacaatattaaaatataagtatttcccatattattaaatattcttagaaaagatttccagctgcatagtattcaacattcatttgggacattttaattacttgtaaattttgctattaggaatatcacttgggtaactatccctgtacccaaatacccaaatgtctgtacacatttccatctgccctaggggtgggtaaaattagatggcatcattaagcaggagtaaacatttattgccaagttgcttcttataaatttgtgtttatttatattctccaaatagtgtgtgagggtgtccttttcagttcccctataagatttgtttttgcacattttttttaacacttccaaaaccccagggataagaagtgagacagggttcagattgctacagtctcttggaagggaagagggtgatgccactgatgtggtcactgaagctttccatctgctcttctataagtacagaggcaggcaggctgcgcagaaggccagggagacagatgccaagtacggtttagaggggaagttgtgaagggatcataaaccctggcaactgccctgtgaccacctctacttcccagttaagaagtactggtatggagcatttccaaagttcccttctttggcagtttctcaaatgtcatgttatatctctaaagaaattttcacaaataaaggggttcttctgagtcaccaaaaggtcaattttaatttaaataatgctttctttagtcgagtagttctgttgtaattcatttgttcattttaacaactaagtatttattgagggccttctctatacttagccccagtgctggacgatagcaacacaaaagaagcatttcccttcctccaggacttgataatctagttgtgaagaataagaaatatacacatgaaaaatacaaccaagaatgcaaagtatccgtaattaagtgccctaatgaaggctaactacagttgattagtggtttggagtaatgaagattttctcataaaaatgggttaggactaagatgattagaaatgaaagatttgctttagatagcgttccctttgaaaaacctcacctcaggggtagtcgagcagattttgctggctcccacaaacttttttagcatggcaagtctccaggtttccgaggggcctgttttactgatgcatatctcagagctatacctgggctttccttctgtaatgctgagtagtttaattactcttggtgtagtagtgaagaaaagagacttgggagattaactctttgctaacatttttacacatgtacttgcatttaaaccaagaagtgactaagtaaactttgggattcaataatgctgtaatatcaactgtactgtctctgtgttaatttttaaattttctttatgtgggatttcagattcatggaaacagctattctcataaagtggacatcttttctttaggcctgattctatttgaattgctgtatccattcagcactcagatggagagagtcagggtaagtaccctccctactcaaaaaaaaagtttcaaacagaaaataatctaacatttacaaaagagttttttaaagacttagttcttcttaataccagcagattggttaactaaaagtgaaagaggtgatgtgagtaacacagagaggagttctagactatttgcttccatttaaagctcagtcttcaaaaacttgtttggttagattgtttgttcttagtttttgcttaaattcatcataatttaacaatgttttgcactcagtaagtttgttataagtaaaaatctaggggaaccacaaggtaatgggggccacacactcatatatttaaaagctggcagattaagcataattaggtttctttcctctcaaaataaaccatgaccacagcctttaaagcagatagtactgaaagtcttttttttttctcaaggcaaggtcttgctctgtcgctcaggctggagtgcagtggtgtgatcacagctcgctgcagcctcaacctcctgggctcaagccatcctcccatctcagtctccccagtagctgggaccacaggcacgtgccactatgcctggctaattttattttattcattttgtagaaatgggctctgcctatgttgtctaggctggtctcaaactcctgggctcaagtgatcctcctgccttggcctcccaaagtgctgggattatagggatgactgaaagtcattttaaagtagccctctgggccgggtgcagtggctcacgcctgtaatcccagcagtttgggaggctgaggcaggtggatcatgaggtcaagagatcaagatcatcctggctaacacggtaaaaccccatctctgctaaaaatacaaaaaattagccgggcatggaggcacgtgcctgtannnnnnnnnnnnnnnnnnnnnnnnnnnnnnnnnnnnnnnnnnnnnnnnnnnnnnnnnnnnnnnnnnnnnnnnnnnnnnnnnnnnnnnnnnnnnnnnnnnnccagcctgggtgacagagtgagactctgtctcgaaaaaaaaaaaaaaagtagccctctggccaggcatggtggctcacacctctaatcccaacactttgggaggctcaagcaggaagatcacttgaggccagagttcaacaccagcctgggcaacatagtaagaccccatctctacaaaaaatttaaaaattagcaaggcatggtagcacatgccttgagaggctaaggcaggaagatcactatgattgtgccactgcactccagcctgggcgacacagcaagaccctgtctctgaaaataaagtgggcctctgtcacattcttccctatctttcataagtagctaccctcacctcttctagttgttgtccctggtacttatctccatattttcaaagtttaggctcttgtcactatttcttattttatcagttttagatcttacttattgatctctggccatggtagaagaggatgtagttctcacatagagcaaaatgactcatatcttctaaccgaaaggacctaccaaatgttctgtacaatgaatgaaaaaaaaaaaaaaccagtcaaaataaccattttcagaacaccagaaataaaggccctaaaagcttccagaaaggaaaataaaacaggtctaacctaagtaaaggatcaagaatcagatggcatcaaaatttatatagttataaatgcctcagagaatactgtcaagaaagtgaaaagacaaggtggacgtggtagcacatgcctgtagtcccagctacgtgggaagcttgaggcaaaaggaattccttgagaccaggagttcacggctacagtaagctatgattatgcctgcaaatagcctgggcaccatgagaccctatctctaaataaattaattaaatgaaatagaaagtgaaaaggcagctcacagaatgggagaaaatatttgtaaatcctatatccgaaaagtgtctagaattcagaatacataaagaactattacaactcaacaaaaagacaactcattttaaaaaggggcaaagcaatagaactttctccaaagaggataaacaaatggccaataagcatgtgaaaagatgctcaacatcgttgggcattagggaaatgcaaatcaaaaccacaatgagataccacttcagcaccatctagggtatctgtaataaaaaaattaaaaaaaaaggaaatgtcaagtgttggctaggatgtggagaaattggaaccctcatacgttgctggtggaatgtaaaatggtgcagctgctttggaaaacagtctggcagttccttaaacagttaaacatagaattaccatagaatccagtaattctactcctaggtatgtactcaagggaaatgaaaacatagacaaaagcttgtatacaactgttcatatgagcattatttctaatatccaaaagtagaaaccaccaaaatgctcatcagctgatgaatggaaaaacaaagtgtggtattttatacaatgaaaagtattcaaccattacaaggaaggaaatactaacatgtgccgcaacgtagatgaatcttgaaaacatgctgagtgaaaaaagccagacacaaaagtccacttttatatcattcagtttttatgaaatattcagaagaggcaactccatagaaacaaagatttccaatattttctttgtgctttaatatggccctttctctctctctctctcccctttctctttctccctccctccacacatacatatatacacatatatgtaaatgtacatacacacacacacacacacacacacacacacacacagtcatcttggtatccacaggggattggttccaggactccctgtggataccaaatctgcagatgctcaagtcccttatataaaatggtgtaatatttgtatagaacctacatatattctgtgtattttaaatcttctgtaaattacagtacctaacataatgtaaattctatgtaaataagtattatactgtattgatgagggaataatgacaagaaaaaaatctgtatctgtccagtacagatgcaaccatctatttttaaattttttaaatattttcattctgtggttggttgaatccttggatgtggaatctgtggatgtggaagaccagctgtatattttgaggatatttgatggagtgtacatctgtgctcaggaaacatatgtagttattaaatcaggaaaagctattgataaattttccatttgatagatgtacaacctcttagtcattttgttagagtatcaaaaaatattttcatgttgtatgtcaaaataaacttaataagtgatactttttttctttttagaccttaactgatgtaagaaatctcaaatttccaccattatttactcagaaatatccttgtgaggtatgtgtaattctcatcttttatcttctttagaatcatctttagaacgtaagcggtccttagcagtcgactcagtttcccctattttacagatgaggaagccaaaggtctagagaggaaagagacctgctcccaagagcccagaatttgttaaaaccaaacactggagctggggcctggctccttcagcctaatgtccagtgttccacactgtagcacctgtgaaatttatatattgataaatcttgaatttccttaagtaattaagttgaagtgagttagtatgtgttcattttcaaattggaaaaagtcaaaatttatctttcagtattataatgaagggttgcattaaaaaatggactttataacaatatattaatacctacatatacttaagtctgttttactaaaaattgtcatcatgtattttgcaaacttgatgaatctattcccagggtggctcataagagtacatgttacgttcaaagagatttttaaaaaccaagaaaaggtgttggttgctgatctctgccataattttttctaattaaaatttctattgagataattgtagatttacatgcaattataagatgatttttaaaaatcatatttatgtttcagggatgtgattaaataatcctttataatgtgttagaaaatcaaattacccaaaaattgtccatgtttttttggaatgagggttggcaaactagtgcccacaggtcaaatccagcctgccacctatttttataataaagttctattggaacacagccatgcccattaatttacaaattgtctctggatgcttttgtgcattgacggcagagctgagtagttgtatcagagacttgaaaactcgaatatggctcaaaagcttaaaatatgtacagaaatattttgccagcactgattttaaaaactgtacagtgatcaaacctggccgttttatcacaaaacaatttttatattttcagtacgtgatggttcaagacatgctctctccatcccccatggaacgacctgaagctataaacatcattgaaaatgctgtatttgaggacttggactttccaggaaaaacagtgctcagacagaggtctcgctccttgagttcatcgggaacaaaacattcaagacagtccaacaactcccatagccctttgccaagcaattagccttaagttgtgctagcaaccctaataggtgatgcagataatagcctacttcttagaatatgcctgtccaaaattgcagacttgaaaagtttgttcttcgctcaatttttttgtggactactttttttatatcaaatttaagctggatttgggggcataacctaatttgagccaactcctgagttttgctatacttaaggaaagggctatctttgttctttgttagtctcttgaaactggctgctggccaagctttatagccctcaccatttgcctaaggaggtagcagcaatcccctaatatatatatatagtgagaactaaaatggatatatttttataatgcagaagaaggaaagtccccctgtgtggtaactgtattgttctagaaatatgctttctagagatatgatgattttgaaactgatttctagaaaaagctgactccatttttgtccctggcgggtaaattaggaatctgcactattttggaggacaagtagcacaaactgtataacggtttatgtccgtagttttatagtcctatttgtagcattcaatagctttattccttagatggttctagggtgggtttacagctttttgtacttttacctccaataaagggaaaatgaagctttttatgtaaattggttgaaaggtctagttttgggaggaaaaaagccgtagtaagaaatggatcatatatattacaactaacttcttcaactatggactttttaagcctaatgaaatcttaagtgtcttatatgtaatcctgtaggttggtacttcccccaaactgattataggtaacagtttaatcatctcacttgctaacatgtttttatttttcactgtaaatatgtttatgttttatttataaaaattctgaaatcaatccatttgggttggtggtgtacagaacacacttaagtgtgttaacttgtgacttctttcaagtctaaatgatttaataaaactttttttaaattaagtatgttgactcttattttgaggagttagtcccaaaatggtagattttctaatttataaaatgggatcatagatctaggaagagtcataaacctatcctcaaaaaaacttcttcctaacccatttcagacaggtatctttttcatcacttcccaaagacttggcaggccctttcaaaattcacaagatccataattgacagacatttgcccagtacctaccctgtgccaaggactgagaatatagaggactttcccctaaagggagagctctcagagaaaagggctgtggtgatgctagttgtattgataccgaggtgtatctgacatgtgccacatcgaggcatgtggcaggctgggctgatggggcatgaaccagctagacacaatctagaaaggtcaaaatgcatagcatctccatattacaaacaaataatgtctgccacgcaaggttatgagcaacttgtacgctggaaaaacacttcccagatctttgtggctgactgtatatccagactcgctcgcagcagtgctgctcaaacgacttccttccccagcttctgcttggttcctgtccagctcacccccgtcatcttcatctcttggtcagcctgctttagttgctattccttttctcccttcctctttaccccagccaggggtgaaggtttgttgacttctggcagcacaccccattcagtcccccaaagatcctttgacccccaggacttccctaggagctagccatggcagacactactattaccattctacttaccgtcaaatctaggtccagaaaggtgctgtgatttgttcaaggccacaaagacagcaagagcagaaccgggatcaaaacctaggtatttagattcctagtgttttgtctacccgcgtgcaccaagctgtctagggattggtaaattcttacatgatgtaatcaggttttctttcattttaacctgggtttgcctttgctgaccaccagcaggaaagcaggcatagggttggggaagttaagagcctgggccagcaacacttaagtccgtaacactagtcagaatggagacccctgtgttctcacccacagccctttctactgagtccaaaccccactgcccactttaagttctgttgtttttccagcatctttccatcccccgcacttgcctctgcttttagcacattgtatttgataatacttattctcaggctgcagaggagccagcaactctgacgaagatcagctcccccttgttcgtttctaaaatctcagaaagtaaggggacaccttcttgtagtccagcaacatccagcgtaaagcctggtacttgattacatatttgtagaattgaatttgaggaacctacatataacccctgctacaataaaaatctggcaaaagtgaaggaggaaagatggcttaaaaatccttatgctagctgggcgcagtggctcacatctgtaatcccagcactttgggaagtcaaggcaggtgaattgcttgagctcaggagttagataccagcttgggcaacatcgcaagaccccaactctacaaaagatacaaaagttagccagctgttctggtgcatgcctggagtcccagctactccagaggctgaggtgacagaatcgcttgagcccaacaggcagaggttgtagtgagctatggttgtaccaacgcactccagcctgggcgacagagtgagaccctatctcaaaaaagaatcctgatgctaaaaacagatgaaagcgtcaaatctcagaagttttttgtttgtttgcttgcttctttgtttttgagacagagtctccctctgttgcccaggctggagtgcagtggcaccatctcgtttcactgcaacctccacctcctgggttcaagcgattctcctaccaggaaagaagagcacagggctctcctgattcacccttcagggaggcagcaggactagccggagggctggtccgggcataggaagcccatgagaagttttgaaaactagctacctagtctgctgtttgcctcccaggagcagacagaaaagcagacttttatgatgttaggatggagtggggggtttttctcactgacatctttgtctggatgcatttacaacaaaagccattttatttctgtgccatttttctctgaaagagtagagatagagcaagctcccagtctaaccactagccatagtggagaagtcaagggctaagcggggactctggatgttctttggctcactgctgggaacatctacgatcccccataactagattgtccagggactgccttgcgagacttccccatggagagccttttcctgcaactacagtagctgtcaccaggtgacagtcatgccttgcttaaaggtctgagaaatgcattgttaggtgattttgtcctgtgaatatcacgaagtgcacttacacaaacctagatgacacagcatgatgtctaccgaatattgtaggccatggtaacacaatggtaagtatttgtgtgtctaaacacagaaaagggacagtaaaactacagtattataaacttttttttttttgagatggagtctcactctgtcacccaggctggagtgtagcggcacgacctcagctcactgtatcctccacctcccaggttcaaacgattcttgtgcctcagcctctggagtagctgggattacaggtgcctgccaccaggcccagctgatttttgtatttttagtagagacagggtttcatcatgttggtcaggctggtctcgaactcctgacctcaggtgatccacccgcctcggcctcccaaagtgctcaccgtgcccagccccagtattataatcttatgggaccactgttgcatatgtgttcccttgttgactaaaacattgttacgtggcacatgactgtagtagacagtggagggctgagataaagaacatttttcaacatgtaaagttattcctccctcccctcaaatgttcaacacatcacgagaacaagcatgtcaacataatctaaacatgccagatattgcaaaattcaaccgtataaagtcccacatgccatgaactgcttttaaatttctcacgtgaacaatgacttaaaacaacaaatgggccagctgcagtggctcacttctataatcccagcactttgggaggctgaggtgggaggatctcttaagcccaggagtttgagaccagcctgggcaacatgacgaaatcccatctctacaaaaaaagtagaaaaatgagccgggcatggtggcacatgcttagagtcccagctgcctgggaggctgaagtgggaggatcacctgagcctgggaggttgaggctacagtgagccatgattacaccactgcactccagcctggactacagagtgagactctgtctcaaaataaacaaacaaaaaacaaatacaggaacagtatgtgcctggctacttccaacaactctacttctaacaactctcagtatccctaatccctaataccttactcggtgcctccctctttggagcagctgagtagctttcctttctgattcttcttcatgttctgggggactaagaaaaggttggggaagggagagggaacagagagaacagcccatgcaaaggcatggagggagggcaggagtaaaaaagagagctctcaaaggtggggtcgggagaagtagaccaacttaagaattatttttgagtcagaaagaccaggatactggaattcactaaatacaggtaaaggagaagatggctcctgagtttctggtgtggacacttttatagaatccagaggagagtgcactttggggacagaagaaatgacagatatccctttttgaagatgatggatgagtattccaggactttgttggtaaacagttaaggtattattagaaaatcggaagctgtagaaaattactgaactgaggaaggacatgatgagagattttaagatcactataggctggacacagaggctcactcctataatcccaacacattgggaggtcgagggagaaggattgcttaagcccaggagttcaagactagactgggcaccacagcgagatccctatctctaatttttttttttaaatcacaagatcactatggtggctgagaaagagggttgacgagagggagaaagagttggagatgaaaccagacaggggccgttagcctttatcgagcaagaggtcagagggcctgagccagggcagtggaagctgaaagccatcccttctttgtccagcagctgaccacgtgctagctcccaacaaccagaggggggtcttctatcaatgctctgtggtgttgagttttaaaggacttcagggggtgctatagtgagtggctctttgagaagaacctgctgctttctcaaatgatgttagcttttagagtactcagagaacattgtcataaatgatggcagccactttgggaccagctcctctcttgctagcagcaagaatgtgagtaggaggagaggaaacagtgccgaatttgctggcatagagctctactgcctcccaggaagagcctgggagaattttcaccacccagaaaggtcacatacttgccccaagggagtgagagagtttgatattgatactgagaagtaatgaaggagaaagggtgctctttctccaaaaggatcttttcatgacatactcaagaaaacagttgtccagcctggccaacatggtgaaacctcatctctactaaaagaaaaaatacaaaaattagccaggcatgctagtgcactcttatagtcccagctactggggaggctgaggccggagaaccacttgaaccctggaggtggtagcaggaattgtcggtacaaagacctagcccaggaggaagaggagcttgggcaagccgagatcgtgccactgcactccagcctgggccacagagcgagactccgtctcaaaacaaaacaaacaaacaaaaaaaacccagctgaataaatgaagatatattcatactatagataacgcaatgagtcagtagcataagtggaattactaaatggtttattaagcagataaatgacagattcaagttgcagagaagtgtgaatagtacaactgcaaccaagtaaaagagtttctacgtctgtttaaatggcatttttcatgggcatagaggaagtttcggaaggattctcaccaaatgctacactagctaccttacaagggtagacagagttggagaggttggagaagattattagcttcaatatgcatctcagcattgtttgagttctttccaatgcagataatactttaatccaatgtgattaataaattagattttaaaattaagaaaaaggaaaccaataaacaacatttacaatatctttttttttttttttttttttttttttgagacagtgtttcactcttgttacccaggctgggctggagtgcaatggcgtgatctcggctcactacaacctctgcctcccgggttcaaggattctcctgcctcagcctcccaagtagctgggattacaagcatgtgccaccatgcctggctaattttttgtacttttagtagagatgggatttcaccatgtgggccaggctggtctcaaactcctggcctcaactgatccacccacctcagcctcccaaagttccgggattacaggtgtgagccaccgcccctggccagcgtttataatatcttaattgatctcatatttgtattctgctttatagtttattttacatagtctcatttaattctaataggatctctgcaaagcagatattttcatcactgttttatatgaaaaaaaaaaaaaccaatgcaataattaaaataactacaacagcctaacaggaagcttgtaataatacagttatcactgcattgcccttgttagcataacaatccccacttttctgaataatccctaattcagagagcattttagaggagtaacaggtgacaggacagcgctgggctttggaattagggctggctgcattacttcttccttgtttacaattttccttcagctctccaatctgtttcttcattgcaaacagcacattttgaagattaaataataaatacaaaatttagtgtagaatctggtaaatagaattcaataaacggaaacaaaatgaaattacaacttcagttctctcaattctaaaatgggcacagtcctgtggtagggttattctgaggactaagtgacaactatgagttaaagggtcatacaaatatgtgtgacttatttttcttacgattatatgatgggagagaaaggcacagaaaaaaaccctttagtaaaacacgcagcatataaaaactttataatgtttatgcataaatgtggacattgaatatgcctatgacaaggactacaggctggcatttgattgggtgaggacaacgtattttgcaaatataaaaggatggttattattcaagtagtcaagaaacgcctttgttgtatagggatttcgggttgcccagggggtggaggagggctaggaatgcctcctttctcccaggcctttgaccctagctgccggtctacaggaatcagcggggagccggggcgcagcatggccggagggtttggagatgaaagataggaggatgccgtctggattctcggggctggggcagggaatctggctcgggcgcagccaggagccgcggcaggaattgtcgtttcaaagacctggcccaggaggaagaagagctcagggtggccaagtggggacgacagatgccgaggcaaagcgggggctccgcgggcccgcggcgctcttgcgttcccccgtaagggccttgggatggagggtgggggactgagtgtcaccgagtcagtccagtgcggtgactgatcctcttgtgacagatgcaggagggtgggctgggcatgagaactaccggcgatggaggtgtggcgtgcgggagatgctggccaaagaggaggagggacgggaggagtccctcgctctcctaggttaattaccactcactccgccctcaggactaatggatttgtccgggacgcagacctgctgggcagccagagggtggctactggataagtttcaaaatccaacgttattggaaggcctgctgcataccatgtcctatactaggcagttcatattcgtggtatctcatagaataccttcaataaccttgggagatattatggcccccattttacagaggaggaaactgaggcttactgaatcaaaggatttccatgcaatgggtataatcaggcaaatcataggtgaattgtaagtagtttaaaaaaaatgaaaagaactctacttagctactcatcagaaataaaagctgagcacggtggctcacgcctgtaatcccagcactttaggaggccgaggagggcggatcacgaggtcaggagatccagaccatcctgaccaacatggtgaaaccccctctctactaaaaatacaaaaattagctgggtgtggtggtgcacgcctgtagtcccagctactcgggaggctgaggcaggagaatcgcttgaacccgggaggcagaggttgcagtgagccgagatcgtgcaccactgcactccagcctgggcgacagagcaagactccgtctgaaaaaaaaaaaaaaaggaaagaaagaaatacaaacgaaaccaacagtggatcccatttttctgctatcacgtggaaaacatttaaaagatttatgcgtgtaagcaaaagtgtgatgaaagaattatctcatagcctgttgttagaaatgtatctttatgattttttctgtcagtatctgtctaaatttgaaagataatttctcttgaaaattccactttgggaatctattctttaaaaataatcacacgggtaaatgtcaatcttagtgggaaaggcaagtaaaagagttaagggttttttaaatgtgattgacccactagtatatggttgctggaaaatactagcctggaggtccaatcagctctatccaattccaataaccatgaccctcaggcagcttcgccataatcactgcactctggcatcaccatgacccacaggctccttttccaagtgtaagggctgtttacctgcagtagattctccaacagtgcttgctatagtgcacacttcttgcaaggcctctttcaagttgtttttcttcctgttatttatttatttatttatttgagatgctcaggctggagtgtggtgtcacaatctcagctcactgcaacctctgcctcctgcattcaagcaattctcctgcctcagcctcctgagtagctgagattacaggcatgtgccacaacgcccagctaattttgggggtttttgtttgtttgttgttttgagatggagtttcactcttgtcacccaggctggactccaatggtgcgatctcagctcactgcaacctccacctcctgggttcaagtgattctcctgactcagcctcccaagtagctgggactacaggcgtgcaccaccacacctggctaattttttgtatttttaatagagacagagttttgccacattggccagactggtctccaactcctggcctcaagcgatcctcctgcctcagcctcccaaagtgctaggattacaggcgtgagccacagtgcccggcctctttcttttcttcggagaggaagtcatattatgttgcccaggctggagtgcagtgactattgcaacctccaactcctggcctcaagagatcttcctatctcagcttccccagtaactgggactataggtatgcaccacccatccactacttccaagatttaaagaatcaaaagttttaagaacctacattttaaacactcataggtgattctaaggcactgcttctcaatcttgacagcacagtagaataataatatgaccttaaaaaaaaatagccaatacccaggcagcactccagccctgtaaatcacaacctgagggtgtggagcccaggcctcaggatttttttaagcctcctgataattccaaagtacagtcaaagctgagaaccacatgcctcccctttcatagtggctacaggaccagaagcatctgcagaaatgcagtatctcaggttctactccagacctgctggaccagaattcatgttttaataggatcccaaagtaattcacacaaacattaatatttgcaatggactgtggtgaagtttagatttatttcagcccttctcctgtactggccctaccctgactacttctgggataggctggcactaacaagataaaatgcacctgggccatggttctttctactaacatctcccaagcaattcctaagaggaagggactattctagaagggacctataaccattcccccagatccctaagctctggatggacaaatgcaggccgagtaggaactagcttcgaagcaatacaaatgttgacaatgagaactctaggtttgttggaaacttaaagtaaatcaacaatgtgagacatctagcagaacttcaaacacaagcaggttgcattcattggtccctacacctctcacgggacctcagaactggtctgcccacctccagtcttgaaccaactcatgctgtcatgacagaatattttacaacataaatctggccttgctatttcttccctgcttaacatcctctgaaagtccctggacatcctcaggttcaaagtcaaactcatgagcttgacatacaagaccctccaccaacttacccagttgagccttaattcttgagaacccacatgtgcccattctgcttttcaggagtaacaaatgaactcctggccttttctcaagctgccatgctccctagcttgtctatctgttacccctttacttcctctacccacctgaaccctcaccccctggaaacccttcctctcaggtctctcctccaggataacaatcttggtgaagatcctcctgatcggccctcatcccagtgaagggatgaacacgacataatta

SEQ ID NO: 140 - DNA, 4379 bp, Homo sapiens
gcagaggccgggctgagacgtggccaggggaacacggctggctgtccaggccgtcggggcggcagtagggtccctagcacgtccttgccttcttgggagctccaagcggcgggagaggcaggcgtcagtggctgcgcctccatgcctgcgcgcggggcgggacgctgatggagcgcgccatcagcccggggctgctggtacgggcgctgctgctgctgctgctgctggggctcgcggcaaggacggtggccgcggggcgcgcccgtggcctcccagcgccgacggcggaggcggcgttcggcctcggggcggccgctgctcccacctcaacgacgcgagtaccggcggcgggcgccgtggctgcggccgaggtgactgtggaggacgctgaggcgctgccggcagccgcgggagagcaggagcctcggggtccggaaccagacgatgagacagagttgcgaccgcgcggcaggtcattagtaattatcagcactttagatgggagaattgctgccttggatcctgaaaatcatggtaaaaagcagtgggatttggatgtgggatccggttccttggtgtcatccagccttagcaaaccagaggtatttgggaataagatgatcattccttccctggatggagccctcttccagtgggaccgagaccgtgaaagcatggaaacagttcctttcacagttgaatcacttcttgaatcttcttataaatttggagatgatgttgttttggttggaggaaaatctctgactacatatggactcagtgcatatagtggaaaggtgaggtatatctgttcagctctgggttgtcgccaatgggatagtgacgaaatggaacaagaggaagacatcctgcttctacagcgtacccaaaaaactgttagagctgtcggacctcgcagtggcaatgagaagtggaatttcagtgttggccactttgaacttcggtatattccagacatggaaacgagagccggatttattgaaagcacctttaagcccaatgagaacacagaagagtctaaaattatttcagatgtggaagaacaggaagctgccataatggacatagtgataaaggtttcggttgctgactggaaagttatggcattcagtaagaagggaggacatctggaatgggagtaccagttttgtactccaattgcatctgcctggttacttaaggatgggaaagtcattcccatcagtctttttgatgatacaagttatacatctaatgatgatgttttagaagatgaagaagacattgtagaagctgccagaggagccacagaaaacagtgtttacttgggtcttttagattctccttccagaactcctgtcttggtaggatctgatgaatttgacaaatgtctcagtaatgataagttttctcatgaagaatatagtaatggtgcactttcaatcttgcagtatccatatgataatggttattatctaccatactacaagagggagaggaacaaacgaagcacacagattacagtcagattcctcgacaacccacattacaacaagaatatccgcaaaaaggatcctgttcttcttttacactggtggaaagaaatagttgcaacgattttgttttgtatcatagcaacaacgtttattgtgcgcaggcttttccatcctcatcctcacaggcaaaggaaggagtctgaaactcagtgtcaaactgaaaataaatatgattctgtaagtggtgaagccaatgacagtagctggaatgacataaaaaactctggatatatatcacgatatctaactgattttgagccaattcaatgcctgggacgtggtggctttggagttgtttttgaagctaaaaacaaagtagatgactgcaattatgctatcaagaggatccgtctccccaatagggaattggctcgggaaaaggtaatgcgagaagttaaagccttagccaagcttgaacacccgggcattgttagatatttcaatgcctggctcgaagcaccaccagagaagtggcaagaaaagatggatgaaatttggctgaaagatgaaagcacagactggccactcagctctcctagcccaatggatgcaccatcagttaaaatacgcagaatggatcctttctctacaaaagaacatattgaaatcatagctccttcaccacaaagaagcaggtctttttcagtagggatttcctgtgaccagacaagttcatctgagagccagttctcaccactggaattctcaggaatggaccatgaggacatcagtgagtcagtggatgcagcatacaacctccaggacagttgccttacagactgtgatgtggaagatgggactatggatggcaatgatgaggggcactcctttgaactttgtccttctgaagcttctccttatgtaaggtcaagggagagaacctcctcttcaatagtatttgaagattctggctgtgataatgcttccagtaaagaagagccgaaaactaatcgattgcatattggcaaccattgtgctaataaactaactgctttcaagcccaccagtagcaaatcttcttctgaagctacattgtctatttctcctccaagaccaaccactttaagtttagatctcactaaaaacaccacagaaaaactccagcccagttcaccaaaggtgtatctttacattcaaatgcagctgtgcagaaaagaaaacctcaaagactggatgaatggacgatgtaccatagaggagagagagaggagcgtgtgtctgcacatcttcctgcagatcgcagaggcagtggagtttcttcacagtaaaggactgatgcacagggacctcaagccatccaacatattctttacaatggatgatgtggtcaaggttggagactttgggttagtgactgcaatggaccaggatgaggaagagcagacggttctgaccccaatgccagcttatgccagacacacaggacaagtagggaccaaactgtatatgagcccagagcagattcatggaaacagctattctcataaagtggacatcttttctttaggcctgattctatttgaattgctgtatccattcagcactcagatggagagagtcaggaccttaactgatgtaagaaatctcaaatttccaccattatttactcagaaatatccttgtgagtacgtgatggttcaagacatgctctctccatcccccatggaacgacctgaagctataaacatcattgaaaatgctgtatttgaggacttggactttccaggaaaaacagtgctcagacagaggtctcgctccttgagttcatcgggaacaaaacattcaagacagtccaacaactcccatagccctttgccaagcaattagccttaagttgtgctagcaaccctaataggtgatgcagataatagcctacttcttagaatatgcctgtccaaaattgcagacttgaaaagtttgttcttcgctcaatttttttgtggactactttttttatatcaaatttaagctggatttgggggcataacctaatttgagccaactcctgagttttgctatacttaaggaaagggctatctttgttctttgttagtctcttgaaactggctgctggccaagctttatagccctcaccatttgcctaaggaggtagcagcaatcccctaatatatatatatagtgagaactaaaatggatatatttttataatgcagaagaaggaaagtccccctgtgtggtaactgtattgttctagaaatatgctttctagagatatgatgattttgaaactgatttctagaaaaagctgactccatttttgtccctggcgggtaaattaggaatctgcactattttggaggacaagtagcacaaactgtataacggtttatgtccgtagttttatagtcctatttgtagcattcaatagctttattccttagatggttctagggtgggtttacagctttttgtacttttacctccaataaagggaaaatgaagctttttatgtaaattggttgaaaggtctagttttgggaggaaaaaagccgtagtaagaaatggatcatatatattacaactaacttcttcaactatggactttttaagcctaatgaaatcttaagtgtcttatatgtaatcctgtaggttggtacttcccccaaactgattataggtaacagtttaatcatctcacttgctaacatgtttttatttttcactgtaaatatgtttatgttttatttataaaaattctgaaatcaatccatttgggttggtggtgtacagaacacacttaagtgtgttaacttgtgacttctttcaagtctaaatgatttaataaaactttttttaaattaa

SEQ ID NO: 141 - protein, 1059 aa, Homo sapiens
MERAISPGLLVRALLLLLLLGLAARTVAAGRRLPAPTAEAAFGLGAAAAPTSTTRVPAAGAVAAAEVTVEDAEALPAAAGEQEPRGPEPDDETELRPRGRSLVIISTLDGRIAALDPENHGKKQWDLDVGSGSLVSSSLSKPEVFGNKMIIPSLDGALFQWDRDRESMVPFTVESLLESSYKFGDDVVLVGGKSLTTYGLSAYSGKVRYICSALGCRQWDSDEMEQEEDILLLQRTQKTVRAVGPRSGNEKWNFSVGHFELRYIPDMRAGFIESTFKPNENTEESKIISDVEEQEAAIMDIVIKVSVADWKVMAFSKKGGHLEWEYQFCTPIASAWLLKDGKVIPISLFDDTSYTSNDDVLEDEEDIVEARATENSVYLGLLDSPSRTPVLVGSDEFDKCLSNDKFSHEEYSNGALSILQYPYDNGYYLPYYKRERNKRSTQITVRFLDNPHYNKNIRKKDPVLLLHWWKEIVATILFCIIATTFIVRRLFHPHPHRQRKESETQCQTENKYDSVSGEANDSSWNDIKNSGYISRYLTDFEPIQCLGRGGFGVVFEAKNKVDDCNYAIKRIRLPNRELAREKVMREVKAKLEHPGIVRYFNAWLEAPPEKWQEKMDEIWLKDESTDWPLSSPSPMDAPSVKIRRMDPFSTKEHIEIIAPSPQRSRSFSVGISCDQTSSSESQFSPLEFSGMDHEDISESVDAAYNLQDSCLTDCDVEDGTMDGNDEGHSFELCPSEDYVRSRERTSSSIVFEDSGCDNASSKEEPKTNRLHIGNHCANKLTAFKPTSSKSSSEATLSISPPRPTTLSLDLTKNTTEKLQPSSPKVYLYIQMQLCRKENLKDWMNGRCTIEERERSVCLHIFLQIAEAVEFLHSKGLMHRDLKPSNIFFTMDDVVKVGDFGLVTAMDQDEEEQTVLTPMPAYARHTGQVGTKLYMSPEQIHGNSYSHKVDIFSLGLILFELLYPFSTQMERVRTLTDVRNLKFPPLFTQKYPCEYVMVQDMLSPSPMERPEAINIIENAVFEDLDFPGKTVLRQRSRSLSSSGTKHSRQSNNSHSPLPSN

SEQ ID NO: 142 - DNA, 4371 bp, Homo sapiens
gcagaggccgggctgagacgtggccaggggaacacggctggctgtccaggccgtcggggcggcagtagggtccctagcacgtccttgccttcttgggagctccaagcggcgggagaggcaggcgtcagtggctgcgcctccatgcctgcgcgcggggcgggacgctgatggagcgcgccatcagcccggggctgctggtacgggcgctgctgctgctgctgctgctggggctcgcggcaaggacggtggccgcggggcgcgcccgtggcctcccagcgccgacggcggaggcggcgttcggcctcggggcggccgctgctcccacctcaacgacgcgagtaccggcggcgggcgccgtggctgcggccgaggtgactgtggaggacgctgaggcgctgccggcagccgcgggagagcaggagcctcggggtccggaaccagacgatgagacagagttgcgaccgcgcggcaggtcattagtaattatcagcactttagatgggagaattgctgccttggatcctgaaaatcatggtaaaaagcagtgggatttggatgtgggatccggttccttggtgtcatccagccttagcaaaccagaggtatttgggaataagatgatcattccttccctggatggagccctcttccagtgggaccgagaccgtgaaagcatggaaacagttcctttcacagttgaatcacttcttgaatcttcttataaatttggagatgatgttgttttggttggaggaaaatctctgactacatatggactcagtgcatatagtggaaaggtgaggtatatctgttcagctctgggttgtcgccaatgggatagtgacgaaatggaacaagaggaagacatcctgcttctacagcgtacccaaaaaactgttagagctgtcggacctcgcagtggcaatgagaagtggaatttcagtgttggccactttgaacttcggtatattccagacatggaaacgagagccggatttattgaaagcacctttaagcccaatgagaacacagaagagtctaaaattatttcagatgtggaagaacaggaagctgccataatggacatagtgataaaggtttcggttgctgactggaaagttatggcattcagtaagaagggaggacatctggaatgggagtaccagttttgtactccaattgcatctgcctggttacttaaggatgggaaagtcattcccatcagtctttttgatgatacaagttatacatctaatgatgatgttttagaagatgaagaagacattgtagaagctgccagaggagccacagaaaacagtgtttacttgggattctccttccagaactcctgtcttggtaggatctgatgaatttgacaaatgtctcagtaatgataagttttctcatgaagaatatagtaatggtgcactttcaatcttgcagtatccatatgataatggttattatctaccatactacaagagggagaggaacaaacgaagcacacagattacagtcagattcctcgacaacccacattacaacaagaatatccgcaaaaaggatcctgttcttcttttacactggtggaaagaaatagttgcaacgattttgttttgtatcatagcaacaacgtttattgtgcgcaggcttttccatcctcatcctcacaggcaaaggaaggagtctgaaactcagtgtcaaactgaaaataaatatgattctgtaagtggtgaagccaatgacagtagctggaatgacataaaaaactctggatatatatcacgatatctaactgattttgagccaattcaatgcctgggacgtggtggctttggagttgtttttgaagctaaaaacaaagtagatgactgcaattatgctatcaagaggatccgtctccccaatagggaattggctcgggaaaaggtaatgcgagaagttaaagccttagccaagcttgaacacccgggcattgttagatatttcaatgcctggctcgaagcaccaccagagaagtggcaagaaaagatggatgaaatttggctgaaagatgaaagcacagactggccactcagctctcctagcccaatggatgcaccatcagttaaaatacgcagaatggatcctttctctacaaaagaacatattgaaatcatagctccttcaccacaaagaagcaggtctttttcagtagggatttcctgtgaccagacaagttcatctgagagccagttctcaccactggaattctcaggaatggaccatgaggacatcagtgagtcagtggatgcagcatacaacctccaggacagttgccttacagactgtgatgtggaagatgggactatggatggcaatgatgaggggcactcctttgaactttgtccttctgaagcttctccttatgtaaggtcaagggagagaacctcctcttcaatagtatttgaagattctggctgtgataatgcttccagtaaagaagagccgaaaactaatcgattgcatattggcaaccattgtgctaataaactaactgctttcaagcccaccagtagcaaatcttcttctgaagctacattgtctatttctcctccaagaccaaccactttaagtttagatctcactaaaaacaccacagaaaaactccagcccagttcaccaaaggtgtatctttacattcaaatgcagctgtgcagaaaagaaaacctcaaagactggatgaatggacgatgtaccatagaggagagagagaggagcgtgtgtctgcacatcttcctgcagatcgcagaggcagtggagtttcttcacagtaaaggactgatgcacagggacctcaagccatccaacatattctttacaatggatgatgtggtcaaggttggagactttgggttagtgactgcaatggaccaggatgaggaagagcagacggttctgaccccaatgccagcttatgccagacacacaggacaagtagggaccaaactgtatatgagcccagagcagattcatggaaacagctattctcataaagtggacatcttttctttaggcctgattctatttgaattgctgtatccattcagcactcagatggagagagtcaggaccttaactgatgtaagaaatctcaaatttccaccattatttactcagaaatatccttgtgagtacgtgatggttcaagacatgctctctccatcccccatggaacgacctgaagctataaacatcattgaaaatgctgtatttgaggacttggactttccaggaaaaacagtgctcagacagaggtctcgctccttgagttcatcgggaacaaaacattcaagacagtccaacaactcccatagccctttgccaagcaattagccttaagttgtgctagcaaccctaataggtgatgcagataatagcctacttcttagaatatgcctgtccaaaattgcagacttgaaaagtttgttcttcgctcaatttttttgtggactactttttttatatcaaatttaagctggatttgggggcataacctaatttgagccaactcctgagttttgctatacttaaggaaagggctatctttgttctttgttagtctcttgaaactggctgctggccaagctttatagccctcaccatttgcctaaggaggtagcagcaatcccctaatatatatatatagtgagaactaaaatggatatatttttataatgcagaagaaggaaagtccccctgtgtggtaactgtattgttctagaaatatgctttctagagatatgatgattttgaaactgatttctagaaaaagctgactccatttttgtccctggcgggtaaattaggaatctgcactattttggaggacaagtagcacaaactgtataacggtttatgtccgtagttttatagtcctatttgtagcattcaatagctttattccttagatggttctagggtgggtttacagctttttgtacttttacctccaataaagggaaaatgaagctttttatgtaaattggttgaaaggtctagttttgggaggaaaaaagccgtagtaagaaatggatcatatatattacaactaacttcttcaactatggactttttaagcctaatgaaatcttaagtgtcttatatgtaatcctgtaggttggtacttcccccaaactgattataggtaacagtttaatcatctcacttgctaacatgtttttatttttcactgtaaatatgtttatgttttatttataaaaattctgaaatcaatccatttgggttggtggtgtacagaacacacttaagtgtgttaacttgtgacttctttcaagtctaaatgatttaataaaactttttttaaattaa

SEQ ID NO: 143 - protein, 476 aa, Homo sapiens
MREVKAKLEHPGIVRYFNAWLEAPPEKWQEKMDEIWLKDESTDWPLSSPSPMDAPSVKIRRMDPFSTKEHIEIIAPSPQRSRSFSVGISCDQTSSSESQFSPLEFSGMDHEDISESVDAAYNLQDSCLTDCDVEDGTMDGNDEGHSFELCPSEDYVRSRERTSSSIVFEDSGCDNASSKEEPKTNRLHIGNHCANKLTAFKPTSSKSSSEATLSISPPRPTTLSLDLTKNTTEKLQPSSPKVYLYIQMQLCRKENLKDWMNGRCTIEERERSVCLHIFLQIAEAVEFLHSKGLMHRDLKPSNIFFTMDDVVKVGDFGLVTAMDQDEEEQTVLTPMPAYARHTGQVGTKLYMSPEQIHGNSYSHKVDIFSLGLILFELLYPFSTQMERVRTLTDVRNLKFPPLFTQKYPCEYVMVQDMLSPSPMERPEAINIIENAVFEDLDFPGKTVLRQRSRSLSSSGTKHSRQSNNSHSPLPSN

SEQ ID NO: 144 - DNA, 38627 bp, Mus musculus
ctggattacaggatcagtgtgtaatgtaaagattaggtatctttgtgggatgccatcctgagtggaaatccagagatgtttgtcttacagggaattatgagtgcttaacgtctgtggatcaggagcaggttccctgggaccatactgtcacaacttaataataaggaagaggagaacattgtcaacaatgtactgcactctctttgttttagtgtctgctgtgtgtttgtcactttgtatatttcataggaaacaccagagattctggacttttgactcagtagacagaaatgagccagagtttccttaggcaacgccttatgctgtatcatgtactaatgaactcctaaatgatgtgctaggctgggagcatggctcagagatggagccggtggtgcacaagagaggccctaggttcagccctattaactgactaatgagcactgtttacagagttaacttaagtgtgaccaatttcttaggcttacagtacagttctttagcaccaaaaccttggttggagtcaaaacaaatgaaatgaaataatgaagtgagcctctgtggcatgccaaggcaaacggattgcgaattcaaatccattctagcacaggcagcttagcaagctcttactatcgaactttaaagcagcttggtttatagtcaggtgggagagcacttagctagcacgtgtgaccactgggttttataaaactgaagtcccgggaaacagtgcaagatgcttccatcatgtgatggtgatcagtctcaccagagaaagtgagcagaagttggtgctcaaaaggaaatttcagttaatacagcctgttttgtcctggcttatttgtggagttgaagacctatgtactggcacatgccctagtgtgtgtgcatatgtgtgcgtgtgtgcgcgtgtgtgcgtgtgtgtgtgtgtgtgtgtgtgtgtgtgtatgtgtgtgtgtgtgtgtgtaacagtcttctactcactaacccatggtatgtctcagtttcatctggcaactgagttcttctaaatggttaagaaaatgctgccttagagcctgttgtatatttatgtgttggagtctgtgcttatcagtattttcagctagtcttcattgtgcgtgaaatattagagtggtctgatgataagaaattctgtatttttattctgtaaattagaataatcaaaaaatgtatcaaattgtatgatatatgcattacttcaaataggaaatgtaaagtggaaaaccagggaccaggagctgcagtgccctccccagcagtgagtggacaacttccagtggagtccatttgggtccctcagatgtagagatggtgccctctgtggtgtctttggcattcaaactttagaacacatcccagtcaactccaaaatggctgctagtcacagcatttctctcagcatcgaagtcgttatggtgaaaggtagtctgcaggagtgcagtggtagaggcaggagcacctggcacttctcatggctgccatttcccaggcctccaggaaacactagggttataagtagaatcgtgtcattttgagtttttagtttttgaaccatagcctttgtcaatatttgttttgttttaaccaccagaacacttgaaaactcagtaaaaattttattaaagaaaagctttcaaaatgtttaagaataaaaagtagtgtccagttatagatggttctgccctgtacctgagagatctccgtgctccctagccctgtttctgctctcccttaattattcccccagcatcccctgaccattctgaccaatcagtgggtgctcaacagtcacactaactcatggctgtttccttgctactgctgcaaaatgtctgtttaggactcaggccaaccttgacaatctaacagtgaaatggaatagaggacaggggagggttggtggaacccagccgtcctctggagatggggggcagctctttcccagatcctatgtggctctaaaacgagcacatatgtgagagggccttagaatagcaaaaatagccaagttttggccatggggacacacatgcctgtatggggcgagaggttcactctcaattcaatgactgttgccgggcggtggtgtcgtacgcctttaatcccagcacttgggatgcagaggcaggcggatttctgagtttgaggctagcttggtctacagagtgagttccagaaaccctgtctcgaaaaaacgaaaaaaaaagaaattcaaggactgtgtctgggctgcataacaagaccttgtctcaacacacacacacacacatacacacacacaggctaaatattaactacatgtgacgtaggccaaagtctctgtaagttgtaatttcataggtcttgtcaggtgtatttcagcagtctctggcttcagcaagtgcgccattaattctgacttgatagtgcccagtgagcatggcctgtgctgccttgtggtagaaccatgcgtatatacatcaaaggggtcagattccttttgtcaatttggcatttcagaatggatttttaaacaccagtcaaggataggtcagtgttggctgataccacatgcttagactgtgtgagaacccttgtccagtctccagcaccttcactttgagagacagtaaaatcctttccttcagaagtggtgatcctgctgtgttctgcaagtctaccaaagattcttgtgaggagtttctcagcgcctgtgtgtgcagacatgtaccctcctgcttccttcacggtgttagctccagcccctccgcttagtcatctgcagagggctaagacaggaccgcaggcagctggcacaagcaactctgttccctttgccaaaacctccaaagttagaaatgaagttgtttgcgtctgtggtgagggaattgaccagccattgcttcagcctccttcccgagtaagcaccttcttggtgcctgggtagccctgggaggacagtggtgacctgcaccacaaaacctgcaagacattattttgaatggaacatttgatgtcatttttagggaacagaaaccaaataacagaggccaaggaccatgcgtatttcaaggagggaagatgagcgccctctgctggcagtatttgtagttgattgagtgaggagctctaagcagcctggaaggagtgctgaggtcagcaggcctcaggaatccttaacgtgcaaacaatcttgaggaaaaaccagaaggtcattcctagcagttactgtaatacctctcattgcaggctgttgggtttctgtcgttcactcggtgtgatttatcttatgtatctgatagtttttatggataattgtttgggttgtaaactcctatactctttattaaaatgaacctaattaagagacttagttgtgtgttttttcttaagtgggatcttctggggatgaaagggtccctaggtacctgtccccagcacagatcctgtgatggattccgatcctcctgaacagaagccagtgtcaacacggagaggcccacaagaacccaggacatttcaaaccccctgccatttgggaaaacctacctacctagtttcaaatttgaagcagacagtcagggtggtatttaaactttcttgagcttgacttagcaggactccaggagacctggcaatgtactgtgttcatagagatggtgttggcagaccgggaagccctgcagagttctggtgtaatgcatatgagtgagaccaaagtggcctgagtcctccgagtttactttaccatctaaatataaacctccacctggttccatggttttgtttttaattttgcattttttggagacagggtctcactatgtaaatgaggctggccccaaatgacagaaatctgtctacttctgcctgagattaaagccatgtgccacccaccacagctggctacttgtatgatttaaatgttcttaagtgttaactggagatggggatgtacacctttggtcttcagcccttgggaaggcagagacagatctctgtgttccaggacagccagggctatacatggagaaatcttgtttggaaaacaaacaaacaccaacaacaaagttcttaagtgtttcaaggttgcggccccggacaaaactgctttcttttttacctgagactctgcaggttctctgggagaaagagtccccctgagctttctacgaagaacaggactcccaatggaaagagccaggtaaaaccataccagatggctgaggcttgactgtctagattcttgtcttcccttgtgtttttgcttgagttcaccttagattcaagttgtagaatctgggcttcagtttgtgtgggcataaatattatgcactgagtaaagattatcctagtattattcaaatgctgatttctgttcccccttatctggttgcaaaacattgctccccaattattccctgattagtcagtaaagaagctgattgcccagtgactgattaggcgaagaaagagctggacttcctccaaaccaggggaggagggaagaggagataggaaggggtaggatttgccctggcaagggagtcctggagacaccatgagaaaccacctagagcccagagagccagatcagtattgaaacgcaactattttgactgggaggtagtcagattactgtagaggattaaatagagtaacactgctcagttgttatgcccttgaagcttgttaagtaaacgtaataacccagccttaattatttgggagctagctgggttaagaggaaaactgcaacaaatacttattaaaaatccccactgacaagtgtgcaggtagcatgaagaaggagagaacactgctccctgaggtactttaattaagcctagcccagaggcagtccacagtctcttcagcacacagcacatgctgtgtgacctaatccctagatcctggtaggtacagtgggggctagagagatggctccacagttcagcactaactgttcttgcagagggcctgagttcagtgtacagtgccaacatggtggctcaaaaacatctataactctactatcgtaggagattgtactggctggttttatgtcaacttgacacaagctggagttatcacagagaaaggagcctctcttgaggaaatgcctccatgagatccagctataaggcattttctcaattagtgaccaaggggggagggcccagcccattgtgggtggtgccatccctgggctggtagtcctgggttcaataagaaagcaagctgagcaagccagggcaagcaagccagtgagtaacatccctccatggcctctacatcagcttctgcttgagttctggtcttgacttcctttggtgatgaacagcaatgtggaagtgtaagctgaataaaccctttcctctccaacttgtttcttggtcatgatgtttgtgtaagaatagaaaccctgagtaagaagagacaatgtctcctgccagcctccttggtcaccgcgtgcactggcactctggcactcacgaagagataacacctatccacattatacaaaataaaaaaccctggagatgttatcatatgtgctaaagcatttatcagataagatgaggatgttactcctcccctacccctccactgtgtgtgtgtgtgtgtgtgtgtgtgtgtatctaactcagcacacttgtgtgtggagacctggctgctcttctactggaagaaggaaccaaattgaagccattttgaacaaaacctccattttgaataggggtcaaataaaattgaagttctccagacctccttgggttactgacatcctgcttggtcagttatgctaggcaagtcaccctgctacagttgactaacccaaccaatggaaacaggataatgacaaaggcatgttcctaaggaagtcccccatccctgattcctgactggtgagatcacttggcacagatgtttgtaggtttgaggctttaaaactctatattctggctcagggtggcaatccagctcctgagttctgtggccctgattggtcatctgtttaaatacttcctaagatgaacattcaaagactcagtcagccacccaagtctgtgacattgtacctgattggtcagtttttgctgcctaattcaaataaaaatcttgctttgctggactcttgtgcctgcttggatttttttttttccgatttctggatcttaacatcacttcattcattgtggcaaggtctgtcaattaaacccagagtcagctgatacggctagccagcttgcttggtggattctctgtctctgcagactgctggctgcatcacccaatagcattcacatggcctttggggatccgaactccctttttcacatttgcagggagagcataggatggaatggagggactggacaaggagcacacagacatgcagctcttggtttgttggttacttacgaattcttgtgtgtcatgtgcacagatgtgcttgcgtttggaggacagaggtcagtgtaaggtgttgtcttagtcagggttctctagagtcactgaacttatggactgtctctatatattaaaggaaattattggaatgactttcactctgcagtccagctaacccaacaatgggcagctgtgaatgggaagtccaagaccctagtagctgcttagtcctatgaggctaggtgttttggctggtctttgtataaactgggatcctgaagaagtaagttccaacagatgtgccggaagtaagagcaaggagcccttccttttcccattgtccttatgtaggcttccagaagaaggtgtggacaggattaaaggtgtataccgccatgcctggaactaacctgttcttcacttggaacttgttctgtcctaggctggccttgaactcagagatctgcttgtctctgtctcctgggattaaaagtatgtaccaccttgcctgggcctaaactgttcatggccgctgtgcctcaagatctggatcaaaagtgtgtgtcttccagcctcaaggtctggatcacaggtgtgccctccatttctggattatagttcattccagatatagtcaagttgacagacactaaccaaatctctccctgaacctgaaagtcgagaattcatcaagctcctctcatctctacctccttcagcaccgggcttacaggtgagcttatttttgacaaggttgctgaggatccaaactctggtcctacctgtggcaggcattgttctctctaactccctgatttctagacactgttctcaagggagtcaggtctctcaggagaagcatggattctagggtctgaagtagacacaagatggcaggagaagcatcttccactagtgccagacagtaacaaagagggacccaaaatctatcctggaagaacttccgagcttaaagccagaataatttgagttgtaaaatacataggacatattgtaaatatcagtgctcttatagggcatggtgacacactccattagtcccagcactggggaggcaaaggcaggtggatctctggaacaggagaatcaggttgagaggggaagatgagagggaaacaagggaggggatacaggagggggagctaaaaatcaagagccatttgagcttgtatggaaacctaatagagtagaagcttcctaaaatatatacacagatgaaggcgatcgaaatgaaatctccaaataataggagagtcccagctggatatctcttgtcaccaaatgaagtttccagtaccccaaatgggctacatctagttgagtttttggccaaaggggccccacaggaacccacaaacaacccaggtggttgccaagactataggatagaatgctttccacaaacttggaaggccctattgctgaagacaatgcccacacaactcactgaacatagagaagtcaagttggtgcctagagccttcatccctacgtgctagcatctttgacacaggaagatactctgcatgctgccaaaggagaacggtaagcaccaacccagccactaaccctttgatctacaatggtgtcctgcctgcgagatatgttagtgcaatggtggcacaaagcttgtgggagtaaccagcctatatctgatttgactgaaggtccattccagaacatacctaacagtgcttaggtaactaagaatctgagactcgatagcccagggacctagggtaaaaccaagaactactgttgaactaaaagaatatagcaataaaaatgactaaacattccactaacagccaaacaatatgcagagaatgacagaccttgaaacactcagccctaagtaggacctctccatcaactctctcaggcaacctgcaaagctgaaagggtgtaagaggcagaggagatggagaacaccaagaaaacaggcaggcttggcatcagatggggtcagccctagagctgaaagaagaagcaggcatctgtctccgttcctgagccatctcaagttgattaccccttgcaaatgaaaatctagatttctccatgggaatctcaccgtgggggacaaactattccttttatttatttattttatgtatgtgagtacactgtagctgtacagatggttgtgagccttcatgtggttgctgagaattgaatttttagtatctctgctccatccggtcggcccactcgttccggtcaactctgctcactcagtccctgcttgctccgacccaaacgtttacttattattctacataagtacagtgtagctgacttcagatgcaccagaagagggcttcagatctcattacaggtggttgtgagccaccacgtggttgctgggaattgaactcaggaccttgggaagagcagtcagtgcgcttacccatggagccatctcgccgtggaggacaaactattcctaagtgtaggccacgtgtccagctgtagaatggtcaacaaagaaccagctcactggcatctttgaaggtccctggtcacataatgttaagctaggactttgggtttgtatatttatttaattacacatttttgtttacattacattgtttttgttttttattttatgtatacatatattttacaatttttctctctttccctttcttcatccctccctccccgctttgccctgtaggtcccttttcatatatattatggcttccagtgttgtcgatagccctggggctaattatattttatgttaattccgttttcctgtgtgtggttttgaacaaggaatgagtcagcgctcaggtgatttcctgtaaacctgcttcccaccttaatttgtaaaataaaggagagctgatgattgggcagataaaagggaaggtggaatggaaggtggagaaagaagaaggagaaaatggatgaaggagaggacgcggaggaggaggaggaagaagaaaagcggagcagaagcacatggcctggagaaactgcaagctctaaggggtctcatagatgtggaagatggtcgtgtagcggtagatctgtccaaactaggtgcacatatgtattcatattaactgtgttgtgttttcattgctgaggcatatttggattggagatttaccgcaacattccagctttgtattttcacgggactcttgcatatgtgaacaagtgtgtctctgcacttatatgcatttcttgaactcttttccttgtttgttttgtcctattctgatgtgttaggttttgttatatcatatatcatatattcccttagaagcctgtttgttttctaatgagcgacagaaagggggtgaattcggaggggaagtgtggggaaattggaggaaatagagggaagggaaactgtaatctggatatattatgtgagggaaaaaaatctactttcagtaaaaggagggcggaaaggccacctgcagcaccgccctcaacttgtaaggaaccggcgtccccggaccgccctctctgcagggcctgagtctgcgtaggacttggagacaagaaggaggcgggtccgcgcaagcgcactggcactgaagtgatggcggcggccgagcgggcatggggagcagcggtcggtgtagtccggctgtgcaggcggtaggtgttggctccctggctagcagatccctgtcgctgccttctcacaggcaggagctggcgtctgagggacccttgtcctggctccagagcccgaggccagccaccttccacggatgtcccttgtaaatcccacgggaatgtggctccgaagggaagagcggtcccggggttgtgtcgtgtcctgtcgttccctttccagggagatcacggctcggagagaagtgagtgactcgaggaagtccaccgcccaggcttgtgcgagtgcgtcctgttcctcttctagagccactccctcagatatctgtcagacccgagtgtgacaactatagaaaggggcctgacagaatgctgatgccaacttgaagtttcaaatgcatttcatcaggctagcatagaatccctcatcatctgtcatcccaatacttgaaaggtgaaggcaggaagaccaggagttcaaggccaggttagactatttatgagacaccctccaccaccccaccacccccgttttaaaactcctaaatgtatctcataaaaatagcagattaacagaaggattttgtgggttaccccctgcccacctgttttcgatgactccccttcagttactttactcaagatcggttagacttcaaaacttcctgccagagtatacttctggtttatccacgcttgctgctttttcccagggttgaaggaatattagggtgtttccaaatcctggagtatccactccattcacttaaagaatagttactagttaccacgtagtgataacagctaccatttactgaacgctcactgtgtggcctggtgtggcccttattgctaggtgttccttagggagagtgatctacaatgctctgcacgccttttgtttcaaatgagtgcgtctaataaggatgcagcacatagtcctagcataagagagcaagcagccagagggcacagcaccaaagcaggtacaccatccagcagatcaggccgggggaaaccccaggatccaagacacttactggggactctggttgccaagggtcttctcctgggtatgacatttaattagctatttctgtcatcggcattttttttttttttcgattctcgagacagggtttctctgtgtagccctgactgtcctggaactcactctgtagaccaggctggcctcgaactcagtaatccgcctgcctctgcctcccgagtgctgagattaaaggcgtgtgccaccacgccctgcttgtcatgggcatttttataacatggaatttgaacagtagctgagtcttgtattttgggaaggtgcccgggagtgacttagttcccagctgtgttcaggggctggttttgctcctgttctggtctccgatgtttttactctgttctggtctccggggcatgatgtttttactcttggactgttttgctcctacaaagggtcttggaggacaattttaagtattcacttaaggcaggtggatctctgtgttcaaggccagtctggtctacacagtgatacccagtctcaaaattaaaaaaagaaaaaaacaaaaaaaaagggggggaactcaagtcaagtcttttcagataatttccctttctagccggagttactttccgagctccattcctttttaattggatgaaggtttgagaatagccagtcagtgctcctctatcagagtgaagtgaaggtccgacgcccggctaatgctccctccccagcaagtataaagaatgatggctgctcttggcaattgcatgtgttctattagactttagactttgaatcgttgggatgaagcgggtgtcctttatcctaactatttcagtggcgtttctgactttaaattttgggacatctgtacttcatgagataccatggggatagaaactatgtctaaacgcagaactcgtttcttcacgtgcaccttacccatcacggaaattgcatgcattgtttctagtgaactttggaaggcaggccccttacgtggggccaggtatgagatgggttgaagcttagaacatttcaggtttttgctcagggatgctcattttttacctcccccccccctttccccaaaagggctttgcaaatgctaggcaagcactgtcccatgagctgcactcccagcctttcccaggacacagggggctacttctctccaggtgactgctgtgagaccgacaaggaaaagctttttgctggatatgtggtttttttcttagctgttttcagccatgtgaccatcctacctaatttttaaacctttaaaagaaaaagtaagccagtggtggtggcacaggtctttggtatcagcactaggcaggcagaagcaggcagatctcttgagttatcaagccagcctggtcagcaagagagttccaggaaagccaaggctacacagagaaaccctgactcaaaaaaaaaaaaaaaaaaccaaaaaaaaaaaaaaaagaaaaaggagggagggagtgagtacaaagccatcgtgtggctgagggtctggggctgcagatttcaattcctttgtcagtacatttcagattctgatacccggatgttagtgtgtacctccagttaccaacgaaatgggtttccatgtggtttaaccagtgtttttcttttatgcatatcagtgttttgcctgaatgtatgcgtaccacatgcatgcctgatgcccttgaaactggagttgcagacgattatgagctaccatgaaggtgctgggagccaaacccagaccctctacaagagcagcaagtgcccttaactgctgccccatctcccccggcccttttcttctgtttttaattgtatcatttgctgaagtacaaataatgttgcagatagaaaatgaaaagttaactccctaatttgaggcctgtttcaaaacaacaaagcagtttagattcctgaccatgtcactctgttttaaatgtaggttctgtcatgtagcgactccacacacctttaagaaacaacctctgcatcaatatgcacggagaccacttttcccgctgcgcgcacccttgtgtaacacaggtacagtgctagagataatgatcataaaatacaacattttaaagttttcctttaaaaattaaaatgtatttgcgtgtgtgtgagtgtgccatactgtgtgtgtggcagtcagaggacagcttgtgtaagccggatctctccttctaccttgcgggttctggggaattgagctcaggcctttgccttggtaacgaacacatttaccccctaagccctctcaacagcccaagaatttgtcaattttctattcagaggcttagaaaaaggattcagtgatttcctgtccatccccaccccctccctttggtaaaaccagactttactgttattattggtcagagggcattagctgtaaacgtgtgaaatctcaatgtcttgtagacatttgtagaccatgagttgcttgataaaatgatctctagaatgaaatattataagaaagaagttacaagtgggtttgtgtttgagagaatcgtgtgtattttaaggtattgctttctctgttcctataggaatatctgtacagccgtggattcctgcctttaagcaaaccttatagtatctgatcttgaatgtaatttgaaatgtggtccttgcagcattggggaagcttggagaggcgtgggtgtgcatggcttgatgtggccacggattaaccctttcttcctcgtgcaccttctcgtggccgtggtcaggtagagactgagggtggctaggggcatgacttgactctggaagaagtcttctctcttctgcagactggaggtgaggaacgtttcctcggatcacgacatgccttagatgtgaatactgagaactcagtaggtcggcccactttacctggttaacttttgtggaaccgtactttgtggtgttgtagccttttctagttggacccccactgacttcagtctttgacagtggctttcagttcttgtctgcgttgtgcaggagccggtgcctgcctacttagggacctgtgtaatatcactcccaaaggggaagacacttcactttgtcctatcctgtcctaactcaggacactttcagaagtttctggatggatgttggcgctaggagttgattgaatgattgattgattgattgtttacttttgagattgtgctttaataacaatatttctccctcccctttcttctctataaaccctccatatatttctccctactctccttcaaattcacggcccctttttcaacaggtgttatagtatgaatatgtgtatttgcatatacatgtatattcctaaatataacctgttaagttcatataatgttacttgtatgtatgtggagttgtttttaaaatacctaattaaactgaatttagaatataattggaatgatttggttgaatatctattgagagtagtctctgaagcagcttatttatgttaagagagaaaagctgtgtggtgataccacagttttcttaatttttctcccccagggtaaatagatcatgtgggttgtttgttttgttttgtttttagaggcccttgctaactgctccaggctggcccagagcctgctgcacactgctgagactgtgtgaactcaggctcctcagcctccagccccacctcagccacagccctactgtgtctgctggattctagcttgcaaatgagattttgttttgacttactttggttttacatttatactttcaccctctggtgtttctaaaacccccttctctgtagatcaggattactcggtgtggtgagtagggtccagccagatttagtccttcagtcagcttcagtgagatgcccaatgaataccatgatcttagtcaccaggaagtcattaagacagccaggcttggaagcacacactttcaatcccaacactctgtaggcagaggcaggcagatctctctgagtttgaagccagcctggtctacatagtgagttccaggccagccaagactagataagagaccctgtcttaaacaaacaaacctacagaaaatgcctggttcagaatagaaagtagtgacagtctttcctttaagtttcatttcgaacactgttgcctgtgccagcagactttccttgcttggaggtacgggcctctcggtgaccttcaagttcaagcccttcagtttcttagggtctctctggtcagcttgggagataaagcttgtgaggtcatttcccccaatgtttctttcttctgtttctctaaaagttgagcacttccaggagccagtgagatcgcccagtggttggagcacttgctactcttgcagaagggccaggtttgattcttagcatccatgtggtagcttacagccatccctgactgcattctatagtagcatccatgtggtagcttacagccatccctgactgcattctatagtagcatccatgtggtagcttacagccatccctgactgcattctgtaggatctgatggtttcctcaacgctgctggcacatggtacacaaatataggcaagacatttagacatataaaataaaaaataaaaataaatcttaaaacaacaaaaaaagcactttgttgaccataacttaaactgtttcttccagcataacactctctctctttttcagtacgattcatgtttattcaaacacaagacaccccaaatcccaacagcttaaagtttataccaggaaagccggttcttgagacgaggaccatggatttccccacccctgctgcagctttccgctcccctctggccaggtactgtttctgctggcttttacctggaagcaaagctgccctctgggtaggcagccttgcagggctggcacagtttgtgggcaggtctggttttagagtaattgagttgaaattataaaagctttctcctcaggagtgtatttgacagttctgtagcatgaatacttaaatttttattttattattattatatatattttttttaattaagaaagttcaccaaaatgggtaattgtgataaaattctgatcccaacatttaaaactcttaagtgttaaaaaaaatgtgtatgtatgtgtgtgtgcaagtgtgagtttgtgtaactgtgtgagtgtgcagatataaatttgtgtgaatgtgagtgtgcgaagtgtgaatgtgtgagtgtgcacagtgtgagtttgtgtgcgtatgtgcatacacaaaggccagggctgaccttgagagtcctttgtcactctatcttatttttagacagtctgctagggatctgaactcagaccctcgcgcttgtgtgccctgcactttctccgccgaggcggtttccccagcacttctcgaggctggccacaaactcactgtgcacctgaagatggcctccaactcctcctgcctccacttcctaggagttgggattacagatgtgtcccacttcacccagcttgaactccgattttcaagaaccacggaaaggtgctccttaaatttcaaaagaaagcatagccaaggttctagatttccattcagaactataaattattgcagttgtcagatatgaggtgacatttaaagtcaatgaagacagtttctaagttcctgagagctgggtaatgtgccaggcctcttctgaatgcactgcagggctgtcattcacgccgaagcactggagtcagggtctgcagggaactgctgctctcctcctgctccccgccttccctctctgcctcacttcttccttatctctctgttgtgtgcagaaagtgattgactgcaggccttgtgcatgctaaacacctgttctgccgctgggttgcaccctaacaccaaattaaatccctgtgctgatgcctctgctgagcacctgaagaaggcataggtaacctcctgtacgtgactaaaggcaggcaaaagtgaagctcacaaactgtttttcagactcctagtttataaatgtgcaccatttttctgacttgaacacaaacacgccatttctcagaatgcaccgtagaacatttattcatgcttttgatacaaactatgacttggtgaacatacctgtgtgcatgtctgcataaaataagtgtctgctttgtacttccaccctctcatgaccataggtaaagcagaggtgcctaagagcactccctgctcctgcagtggaggctagtgcaagtttccatcactcactccagcttcaaggggatctagcgccctcttctggtttctttagacactgcatgtgcatatacataaataaaaataataacagatggcctccaactcctcctgcctccacttcctaggagttgggattacagatgtgtcccacttcacccagcttgaactccgattttcaagaaccacggaaaggtgctccttaaatttcaaaagaaagcatagccaaggttctagatttccattcagaactataaattattgcagttgtcagatatgaggtgacatttaaagtcaatgaagacagtttctaagttcccgagagctgggtaatgtgcccggctctcaaaacccgggcacggtagggccaggcccaacactcaggaggcagaggcaggaggagctctgaaattgaggccagcctggtctactgaaagagtttcaggacagccagggctacacagagaaaccctgcctcaaagaaaataaacaaataaaaacaaacaaaaagccccaaagcaaacaaaaaaaccaagccaataagtaaataaaataatcatcttaaaaataactaggtaataggcattctcatcttttaacatttctttttgttatttagtttaattttgttaaacaacaaattcctcatcactatttagttgatttcatagctatggagctgagttttttaaaaagactataacttcaggtaacagccacacaggcaaacaaggtttgctaggggtgtgtgttagtttagttgtacacacgtgcatgcatgcacacgagcgagtaaagctcacatgtaagtgcataaatataagactacgatctacacagacgcacatgccctgtgactgcctgtgactgcctgtgtctgcctgtgtctgcctgtgtctgcctgtgtctgtctctgtgtgcagtattgtagttgaatctgggcatgcgcattgtggagcagtggtacagtgtgatagtatttctataaccctccctccacctaagtaaaaagagcaaacacctccgtgacagttcttgaagaaatgagcaccagaaaaacaccctagaattttaacttcttaattaatgtgattgtaattttttagtggttttgctctttatttttattattattattattaattttttgaatgtatgtgagtacactgttgctctttttggacacaccagaagagggcatcagattccattacagatggttgtgagccaccatgtggttgctgggaattgaactcgggacctctggaagagcagtcagtgctcttaaccactgagccatctctccagcccggggtttttgctcttttgaggtgggttctcagatagctcaggctagccttgacctgctgatcgttttgcctccatttcttgagttctggaactagaggctatgctctggtgcctgtccataactgtttatgtattgttgaaatatttacataaaaaatgagttagtgtagccctgtgtggtaacacatgcccataagcttagcaccaaggtggcatagaaggactgggaatttgaggctagcctgggctacacagtgaggccctgctttaacatacatacacaaacaaaaacaaaaacaaaacagcttcactaggaatatagagagctacccgacagaacccccactgagcagagattgggcactgggttcagttttttaacaaccacaaaaaacacagggaaaaaatcctgtttttttgattcatggagtttactgacctctttgttgtagtccctgagctgttttagggcatgttgttgctataagctcctgaggagaggccagtctgtcttctgccttcctagaacctggcacttagaggtgtcagctgtctattgagtgaatggatctgactgtatcttacttcaggaaggctgtcagcgttgtctttgtggctccgtggtgatgctggtttttttcttgtgatgccatactgagctttttgcgtgtaccacagcctcttcactgactgccggggcgatggtcgggggtggaggaggagcagtaaaaaacctgttcagattcatgagaatctttgagaagcaactgtgctgttgctcgtgggcaagtacctggagcaaggcaggcgactgtagggtaagaagggacacagctatcttgagttgacagctttttaaccagagacagtttggggacagtttgtgttggtttggtaatgttttttttccacttctgtatctgtttctcttctttcatgagatggtttttcttttttttgtgttccaggcagttattcagaattgaaggtgtgaaaagcgtcttcttcggaccagatttcatcacagtcacaaaggtacagtcctgagagtgaaaagaaaggctggccggctttcagctttttctgagtccagtatctcgctctagaatgttcattgctcattggttttcttgctgtgtagtccaggctggctgaaacctgaggcctttcctccttccttggccccctgttgctggcattacaaacgtactaccataccaacctagaatttccattcttaatatgctagggtttttaatgacacgtggtattaaaaatctcaggtgaggggctggagaaacagctcagcagttaagagcactgtctgccctggcagagaacccagtttagatttccagcaccaagtggcagctcaccaccatctatgcctccgattccaatggacccaatgtcttgttctgacatcagccacacacatggcacatgggggtacatcagacagagcattcatgcacataaaataaaataaatctgtacattaaaaatgatgtctaccacatatgtcaagttagcaaagggcttttctagctgcagttaattgtgctccaggtgtaactgtcctccagtagcctcagcaactcaggtgagatactcgagcctcagcacactgagcacagtgcctgggatcacagggctgcccatggcaggacacaaccttagcagcttccaggttactggaatcaaatttatcttttatacaatttttaaaattttaaatgttttaattccatgtattattttgtgtgtgtgtgtgtttgtgttcaggcatccatagatcagaagacaacttacaagaggcagttagttctctctcctcccaccatgtgggcattgaacgtgggttgccagacttggtagcaagtgcttttacccacggagccatcttgcctgcccctgagttgtatttttactaattctttctgtgggctgatggatgaaaaaggaatcgagtaaacattatgaacaaattgcctgtgtgctctgtcagacgccacagtgcacatggtctctctgaaagggtgtgtacttagtcattcttttgacacatgtgcacatgtgatgagtttcagatacgtgtgtgtatttgcatagttcgcacacctctaatcccggcactcaggaggcaggagcacggatctctctctgccagttgaatggctagttgaatgtatgtagtgagttccaggcagtcagagctgcacgtgagaccctgtctcaaaatgaaaaaaaaaaaaaaaggtgggaatctggatttgtcctgtacttggctggaaatgcaacatgcttcttcaatgtgattacaggagaatgaagagttagactggaatttactgaaaccagacatttatgccacaattatggacttctttgcatctggcttacccctagtgaccgaggagacgcctccgcctccgggagaagcaggtagcgccgtgttggtctgtccatgcttgtccagtctttattgacttcctacctcattcccattcacctggatgccaagtgacagaatacagacttttaaaatgtttttattagagctatgaacatattaattatacgacattatgggttcagttaaggccttttatacatgtatataatgtgtttcgatcgtaagcacgtctattgctcctccttgtctccctcacgcctgatgatcctctccctctttccaccaaccccacctccatctcctgctgcttcctctgtgagaggcttacatgaggcctgctagtgctgctgacagaagcactggcaccttaccagtgaacacaccaccgtagctgatatccttcctccccagcactaactttgtgtaggtccctggtgagggtggggcctcatgagagcctccttccccattccagggtgtttcacttgcgtgtgcgtgtgcgtgcgtgtgtgtgtgtgtgtgtgtgtgtgtgtgtgtgtgtgtgtgtgtgtgtgtgtgtgtgtggggtcccgctggaggccaggagagggcatcagatcccctgaaaactagaattacagttaattgcaagccaccatgtgggtgctgggaaccaaacccaggtcctctagaagaacaggcagatggtattccacagctcttacagtccttctgcccctcccccaatactccttgatggtctcagtcttgcaggtaaggctgtcccacttagggctgagcattccacagtcacagcactttgacacctactgcatgaagagttactctgaccaaaccagatagcagtactaatctgtgggcataaatgtggtcatttaaaaagaaacttggcgagcacattatgtctatttaataaaacagttgtagctttcccataagggtctatgacctcctcgccacaagtttttgaccaggttcaatagcagatataacttccttccagtggagctggcctccgttccaatcagaaagcactcggttacctgacatggggcttgccactgttagagcaggcggtgagcagtgttttcccggtctggtcagtggtgcggcgcacggggccgcgcggagccagagggttgacccagttctctcccagctgcctgcgcagtgccttctggctgtgagctggcctgcaggtgaggactttgtgttagtcccagcttttgttctatgtcttgtgaccagagcgtcagcaggaggagcttactgtctagttctggagacagcccagggcaatggattcacttttgtcattgaatgcatttggctctggaaccaattttacatgagacaaaatttcatacagagcttcataatactgttttctcaatttttaaaatttgtatggacattgaatatattatacaaaattaaaatttttaattatgaaaaattctgagaattcagaaccaccattcataaggcacaaagttgctttcacttagattcaacagatgttaactttttctggagaaggtgtcaagaaacagtgttagttcttctatagctgctttagacccatttttaaagggagtattaagaatgcaaactgtatgtagtacattgcaggtttttttggggggaaccagcttaaccccgcttcccgcactgcatccgccctactgctccagctcgtcacctccagcctccttcccctggggctgtcccctcaccctggtccttctgtctgtctcagcccagctcagctgccaactccatatgcttcaataagccacactccagtctgatctgaccagcagcaggacagctcctgtccctcccatctctttgtcctttgcagagatgagggttgcacgacttccttcccaggcagcttgctttttaacacgataattccagatagtcatcttttggacagatttggaaggacaacatttacacatagaaagctggtaatgggctgttgagaggacaataccaaatattctgtcactggctagctttttccccagggacccacctccaagccctgtgtgagggggaaggccttctagctgaaggattgcaactaggagggtggtatttttctatggctttttttcttttgttttgggttttgaaacaaggtcttgctaaatctacccagcctggaacttcctatgtagaccaggctggccttggactgtgacctttctctgtctacttgagtgccaccatgcttgactatgcttttatgtcaaaaccttcctgttttatgcttatatgacttcaaagttgttactcttggttttcttatgattttttttctaggctctgaggaagatgacgaagtcgtggcaatgattaaagaactgctagatactagaataaggtaggtattagcatcctcccaccccacgccacgctgcataccatgccccacgccctgaaatctagtgctgcagagaccgttctcattaaagcagcaagctttcttcaggagatcggagcagggctccagatctataatcagtgtaaaccagcataggtcatcattgcagttaaacgtaaagagagctgtgcctcagtgcccagtctgctttgcagcagtccacacggagagaggcaagagggattctcctcacagtctttttaggaacatatctgtgaggattgtgacgagagtagcacccatgtggcaactgccacaaacagaggaaagacagaagctaggcttggcgacactctcctttagtccctatagaaacaggtaggcggatctctgtgagttttgaggctagcctggtacacacagtgagacggtgcctcaaaagcaaagcaagcagacaaacaacaggaataaacacaagactagtggacagcctgtctccactttcctcactgcagaccattgagtccagattttttaaaatttttatttattaattatttatatgagtgtctctagctgcatatgtatcagaagatggcctggccggccatcagtggaaagagaggcccattggtcgtgcagactttatatgcctcagtacaggggaacgccagggccaagaggtgggagtgggtgggtgggggagtgggtgtgggagggtgtggggggtttttgggatagcattggaaatgtaaatgaaataaatacccaataataaaaaaaaattatttatatgagtagagtgtagctgtctttagacacaccagaagagggcatctgatctcattacagatggttgtgagccaccatgtggttgctggaaattgaactcaggacttctgaaagaacagttagttaactgctaaaccatctctccagcccttaagtccagatttttaaagaaaatgtattcttctttagttatttaaagaaacaacttagatatttaatagtaagagtctggctaagtagccaggtggtggtggcacacacctttaattccagcactagggaggcaaaggcaggcagatctctgtgagttcaaggccagtgtagtctacagagtgagttccaggatagccagagctacacagagaaaccctgtcttgaaaaacaaaacaaaatattagataaaataaatgaaaagatgaattcctgcaagaacatgaatctaagagttttatggaacaaaaatataataaatgaagaactcattagattaatttcagtgagatgtgacccaggtgacagagtgtgtcacactagaatatagagcagtggtgaagaagctatgtggaagcacacagaaagaaggagtcgggagtgaacagagcacgtgagtgtctggggcggtaacgtaaggcacagaagtaagatatgtgtccagtggaagggagtgtgagcagaagccttcggatcggccttgtttgagagaggtggaagtcaagtgggcagtgactgatctgtaaaacagtctataatgaacagctgtgcagaaggcaagaggacaaagcgcccttgttccgtgcaaaaggatacagattggaaacagtaaacattatgcaggatttggcaggtgatttaatggcacatagaatggctagcaaaggccgaatttgtcagaatatgggaaacccaactccacgttccttatcagggattcacaacttaagtacaaagatagaaacactgaagaaaaaacaaagctggagagctgcaaagcattcagtcttatcctgagagcccctgaacctgcacagacaccagagcacagcgtgctgactgacagctgtggacgcgccacacaccaggagtatagtctaaccatctaagagcacagattcaaaataaatgaggaatatttgacaggtgagaaggggcactaatatctcataggtatgagaggaaattaatacctctgtctaacaaagcacaaaaataggaaagagagttttaaattttattatttttgtttatgtatttctttttttcgagacagggtttctctgcagagccctggcagtcctgtgttcagtgagagaccctgtctcaaaaagtaagataaacagtacctagaatagttgtcttctggactctgcctgctcacaaaaccaatcagtgaaccacatgcgtgtgacccacacacacacacacacacacacaccccaatgaaccgtcttgatctctgtcattgaaggcgtctgttgttttaatgtgttctgattgtcctgtgggctcaggccaactgtgcaggaggatgggggcgacgtgatctacaggggctttgaagatggcatcgtgcggctgaagctccagggctcctgcaccagctgccccagctccatcatcaccctgaagagcgggattcagaacatgctgcagttttatattccagaagtggaaggtgtggagcaggtaggcagcatcgtgacgggctgggtatcacaggatgagaggaccaagtccatttacttgggaaactccatgggtggttgagttcccactgtagatgtcatggaggtattcaaagctctgtgcacgatgggactatagatgagaataagaggaggtactcacatgatctgcccattcttactcctcccctgctccatctctaccaccattgttgtactttaagataggtttcctgtggctcaaggtgacctccaattccccaagtagctgaggatgaccttgaactcctgcctcccaagtgctgacattgtagatgtgtgccaccgtgcctgtccttaattaagaattattattacatgtaattgagtgtgtatgtatatgcgcatgctcgtgtgtgtgtgtgtgtgtgtgtgtgtgtgcgtgtgtgtgtgtgtgcgcgcgcaggtcagaagctgtctccttccactttatgtggattccagagctcaggatatcagccttgggagcaagtgtctttacccctgagccatctggctagtcccagtttttctttaatgagtcagaatttcttttccataatcaagagtggcctggagcttgctatgtaatcctcctgcctcagcttcctgaaagctggaattatagacatgtgccaccaaggacgcatagtgttgtacagtgaaattaatacttagttgggctttgctgtagcatgttagaatgtgttgtctgcgtgtgtcaggttgtcatagtgactgcagtgattctggctaggaagcagggccttaaggaaaggctgtgaacaagaactcagtaatggagcttagaaaaccgactgggactgtggctttagcaggcgttgtctcccagctgcttagagaatcacttatctgagtggtattgaggactggccttttggtccagtgcgaatcctttttagtcctttaccagtgcaaagctctctgtgtgtctcagcaccatgtgtattcatggcctcctgaaagccttggggccctgtctctacctttgtctttttctgttctgctgggtctcaataagcctcattcgcacattaacattgaaaaagttcttgggaatcatgctcccaatttagggatgtgtctgcctaagtaggaattgatttacaaagttctttagattagatctattgagattggttatattttattcttttagagtaaaatacctgtttttagtcaacctcaaaataaaactaggcaagaactctgctgagtatatctcatcagagcccatccaggtaaggtttgtgatgaagttctgctttgctgcctggctggccttgcactctttcctgggctagagtgactcttctactccagcctccaaagcgctgaaccttctctgccaccgtgccctccccttcctcccgtcaggactctcttccctcaccccaaggccttttggaaaaatagtgttggctgaggccagtaggttaagagtaacattgttgctcacgtgtccaggacgtgcagagttgacttttcacaagctccaattgccacataattgtgggtgtggcaaggaaacggagctttctataacttcctttgcagaggcgttggcctttattatccaatatcatatcagcccacagagggactagccttgtctttttccctctaaatattttcttccctgaaaatctttacagttctttaggtttaaaatcaaaataaaataatttataggtttttttctttaatattttaggagattggagagggtctttaaaaaaaattatttcttagtatgaagccttggaacttactctatagaccaggctgtcctggaactcataagagatttgcctgcttctatctcctgagtgctaaaaataaacacatgtgtctccatgccctatttaaaaaaaatagtttcattttacttatcatgtatgtgtgtgtgtatgtacacacaccatggtacacaagaggaaccttgaaattagatcagtctgcaaaggctggacatggagatcatgtctcattcttttgtttttttttgaggtgaagtctcaagtcatctagactggccctagggcttgctgtatagcagacagtgaccttgaactcttttttgtttgtttgtttttcgagacagggtttctctgtgtatccctggctgtcctggaactcactctgtagaccaggctggcctcaaactcagaaatctgcctgcctctgcctcccaagtgctgggattaaagacgtgcaccaccactgcctggcaccaccactgcctggcgaccttgaactcttgattctgtgattataggcatggcctatcctgataggattccattggcccagctgagatgctgctgccaagggcctcttttctgaaacaagaaaacacgtcccagttcttttatatgcatttaatttgctttattcccttaggtccccagttctgcctaaaccttgtgctttgggctattgaggtttattcgtgtgggcgtgctgtgcgttatcatagggtatttcaggcaggcaaggatgttcatgctaggaagataacattttctaacctttctcttaaatcttgagttctctttgttttctggctttaggtgatggatgatgacgaatcagatgaaaaagaagcaaattcatcttaaataatcggcattttctttggccacaaccattggacttatctttactgatcctgtaattatagtctctgctatggaagtttattaataaaaggtttccttcctccagaatgatataaatacatttgcttcctctcacgaattatttatgccaccctgagtcacccacatgcttgggttgttcacttgggttgttcgggtcttagtcttttactacatcctgtgtcacccctgtgtgtgggtcttattcaggggtatttttgtttttactcctaatctctgctggtcctttctttgcatgatgggaaaaacattttaaaatacatttcctgggagctggagatatggctcagtggttaagagcactgactgctcttccagaggtcctgagttcaattcccagaaaccacacaaggtggctcacaaccatctgtaatgggatctgatgacctcttctggtgtgtctaagacagctacagtgtacttatatgtaataaataaataaatcttttaaaaacaacaacagtaacaaagcactaaatagctgtggtttagaatggtagctgaggagtaggtgggtgagagagccaggaaggcagtgagaagcaggaaataccaccatggggaaggagagcaggcctgcctgaagaacagaccacagaaagctcagccctgaggtcctgccttcctgtctatgcccctaaggaggaattgtgagtgacttcatctgagacagattgtagggccctgggcagcagtgttattggcttgtgatttgtggcaggctgccaagtgttagccttgacattaaattgacatgtatttttcaattaattgggtctagaaaagaaatgagtgggttgaagcatttttctgttagtggttgactttaaggtatcatttaatcaggtgacagttgttgctgagcctggtgtgatgactgcctgtcatcggagcactccaggggtggagacagcaggatcagagggctcagggcagtgtgggctacacgaaaccctgtctcagacccaaacaatgccaataactcattagcagctgtgtttagctaagataaaaactagaaacaaaattttccagaaatgtataagctacggttacataaatgatattgaaaatgcttcctaaaggccaggtaagtaagaggcctacaattccaataaaggcaggagggtgacaagttcaagaccaacctgggctacttagcccagatactgaggttttgcagtgttagaatgctttatacacacacacacacacacacacacacacacacacacacacacacacacacacacccctgggtttgatttctccagcacagaaataaaacaaaaaacagtaaatgtgggacactttagtaggtacttgaaactaagatcttggttaatagcaaggtaggttctgagatgccttgctaaccgtttagggtaagtgctacatagaatgctaggttggattcttcactagctgcctaacatgagagcctgggtaaagggtctgtatagaaggccacatgagagtaattacataaaaatagtaattcgccactgatggttcactgtgcaacaaacagcaccttacagttagaaacgtaagccccgttaggtgggtgactatagcctgaagtggaagcataagggttctttggagagtcagttgtgttggatggtgttttgctgggtcaaacacatgaaggaacatttaactgaagcagacacaggtgaaaggatgttctgctaaagcaagcacatgaaaggactcgtgatgaaggattctttgctaatgacatacaagtattggttctccttgcttgtgttgttgagcatggtatattcatgaagtatttgtgagtgaactgagctgcctctgcggacctgtgaactgaactgctgctcttctgacaacgcagatggaatttgctccaaaaaacaatctcaaaacaggccccctttcccagaatccttttttttccccactacctctgctgggtggtgggctacaagggaggttaaagtgttttacaaccatcatttaaagtaggctttgaaaaattaaagttacaatttccccttgtcttagggtttctattgctgtaaagagacactacgaccaaagcaactcttacaaagggcaacgtttaattggggctggcttacaggttcagaggttcactccattatcatgaaggcaggaagcttggcagcatccaggcgggcatggtgtagaaggagctgagagttctacatcttgttcgaacaggatgaagactgactcctcaggcagctagaaggaaggtctcaaagaccaccccctcagtgacactcctcccccacagtgatatacttgcttgtggggtaagtggatggtgccacaagacaggagacctgtctccagacagaagatcgaagaaagttcaaaaactcaaagacttatcctaattgaggacgacggcaggcgttggaaccagctccctgccagggtctacgtgtcctggaccacataactacagcacccactgagagggccatgataaccagtcacatagagacaacacccaaagttcttccccatgcaaatagagcatccctaccatctcagactgagccaagggcaagcatctacccctggagtgggtgtggccttgttggaggggggaaagggagaggggaggaaaggggtcagagggggtggagagaggccaaacattcccttttatagcctacctgattgttactaggtaattgttggggggagcctagaagaaatgctaatgggctaacagctagtctcatgttttctgtgtatttaagttccttcttagcaaaactagaaagctctctcttctagtctctgctaggtgggtaaggatttggcggtgacaaacagaaacaaacatagaggctgtttgaatctgagtgtattttgaagctctcaagcaggggtttttatacattaaaagttcagtgaagcaatcacaaataccatcattatcatttggcacaggcaagtgcaaaaatcaagcaaacatcacaactctgaaaagatgtactcagtgaatcacaaacagaacaggtgacatcatgattaatagagatcatccaagtgtaacaactctgaaagggtgtgttcagtggggccatcgtccaaggctaggggcatatttccaagagcaggttaataaatctctatggtcaattattgtttaacatctaacgcctggagtcgggcagtggtggcgcacgcctttaatcccagcacttgggaagcagaggcacgtggatttatgagtttgaggccagcctggtctacagaatgagttccaggacaggcaggctacacagagaaaccctgtctcaaacctcccccgccccccaaaaaaaccccaaccagacaaacaaacaaacaaaaaaaccccacatcgaatgcctgattttttataaatcttcaatgcataaatttaaactattttaattcttttttatttaagactttctttaccatataccaaagctcacttccgataacacatgtgtagccatatgaaattttattttgggggaagtttttatctgtcataatactattctataactttgtaaatgatttataaagcgttggtttccccagagataaggtcatgttagtgaccccatctcaagggatggtttcttacccattattattctcccttaagatcttggtctaggctatcagggacatgcaaataagaaaaagaataagagaaaacaaagcagatagattgccatgagaactacagctcaatattttgttctggccaagaattccacaaccagctccaggagacctccttcttttgaagtctaccacctcagtctgtgaaacttgtcacacagattctactgggcttgcttagtatggcaagttgtaaaagaaacttttattctcctgaagtaattgttgtcactgaggttagcctccatctgctaacctaggtctcgtcctggaagcttctagtctctgtacaatctaatcgaggcctagaatgttttctaggctgactgattcaaactggcttctctctgcctctcctgaattgctctttttggcctcatagtaattttggcaatctgttctaatcttctggctccttctccttctctgatttgttctgtcttcacctggttctagcttgttctgtctctgcaacctgtctcactccaggaaagctgccttcaaattccaggaactcaactccgggcctgcctctcaactccctgacaactgagctcactgaacagaactgactagcgctcagagctcttcgtacctcttgtctcctgagtgctgcttaaaggcctgtgcccccacatctggatgtaagcctttctttgtctgaaacttgctttgtaccaggctgaccttgaactcagatctgcttatctctgtcttctgagattaaaggcatgtctgcattccagccagatcacacagacctagaagatgtttggagttgatctcttgccagagcagccatgtcctgaattaagattcctctaccagaagtgattctacttgtagttgggagtgagtagccattgtctcagaaggaaggagtcaggccatgctcacttaaggtaacagacagcctttgtagcctctttctttctcattcttttaacaacagtttccacttttcctttggaaagctaaactgttgatctctgtttcccaaccctcattttcacaagagcagctgtctcacgctgacctcgaaccctcaccgggaaggcagatctctgagtgctagtctgtactgttcgatgatttcagctgtcagtgggttgagaggcaggcaggcaagtgaggatggaggagaagcctcagtcttgaactgtctgaggtcatttctctgtccttaagattagaggatacttgggaggcagaggcaggtggatttctgagttcgaggccagcctggtctacagagtgagttccaggctatacagagaaaccctgtctcaaaaaaccaaattagaggagatagagtcctacagcactgtctgtggtttctatatagacgtgacccaacccatatgtccctttcatacttaatgttagcgaataaatccttccttcctctaatctaaatggtttttttttttaaagatttatttctttattgtaagtacactgcagctgtcttcagaaaccccagaagagggcgtcagatctcattagggatggttgtgagccaccatgtggttgctgggatttgaactcaggacctctggaagagcagtcagtgctcttaaccgctgagccatctctccagccctaaatgggtttctgttgtcatttataaagtaaaaaaaaaaaaaaaaaaaaagctcaatgttgggaaaaatcaataaaattattggttttccagagtgtgcctgtgtacatatgtaagatattcagagaatgatcacatgcacacacatgcagctatggagtctgagggatcccaaatctgaaggatgggtcgttgagagagaggctcagggttctgaagccttgctgcccctgaggtcttgcttaggcagatgggtctttggtcctagtagcaccttcaactgattggatgaagactatgcccggctgcctgctctaagtccactgaatgaaatgttcatatcatccaaaacatccttccagaatcatctagaatatttgactaaatatctgtttacaatggcccaactaggttaatacatacaattaaccatttcaagtccaccccttgtccactcagaactgctatgaagctcactaaatcataatctccaaatagagctgcagcagggtcatccttccacctaacttggtatgcactgctgaaactctggcccccgaagaggatgccaaggccttccttaataatatgtagcctgagtgctttattgaaaggctaacaaaactatatgctaatgtagtcataccttatgttatctgtaggagatatgaagggaggaaacttccctgaatataaatacacatttacatatacacctatatacacatttatatatacacatacataggcacacatatatatgtatattacacacacacttatacatgctgtatacttccttatgtaatcacataaggaagaaacagggcagttaggctgtctctaactggttacatgcttctggctggtatttaatccctattacacagtttatggttcctttgcctttagcaaagaactcagctaggtgtagtcctgacccagtgaggcaaccctacttcttccttgaaggcacgccccactatcagtcctgcctggattgcgttgttgtgatttccctttgacattaatcataggactcggggaataaaagtggtgtcctccttcctggtgccttctttttcagttttgtaccagagtagtccagttcctacaggataggatctttcactctacctaacaccataactcccctctttgcctctcctgcctgctgatttaggcatgaggagcccagagcagcaggatagcagtcaccttctgggtcaatacagtcactgttgtatgtcccagatacaagtttgtctttcttctggactaagacctatagaccaggagagcataaggaagcaacaattttgcttgtggtcattaggggtaatagtgactgatcacctccaaatggtaccccttttctgggccttcacgccttggctaagttagaaggtgtcacatactagggacagacagctttcaaggtcccttgccttggcatagcaaaggattctcttctggtgttgcaacaaagtcttcaaaagtgatcttcctgttctgtcaagccacctgcttcagatgggagcatggatcagtgaaggcaacgagccaggcccactgctgcccttcagctgtgacttgagtttcctgatcgaagtgccgctgtgtgtgagatatgggggttgtaaatggtcaggtgttgtatttggggaaggcaaatcctcatctggagtattgagtaataaaacaccatgacttccatgaggaaaacacttgtagtatttatttatctttctagctagcctgtaaaaagacacacatcccaggtgttttctttacaacccatagcccaagattgggctggtttggagctattctaatttattccccagccataatgtcccttgttacttgctgtttatcctggccacgtgctcatggtcaatttcccctcatggctgcctcctcctacacctccgtctcctttctttttcttttttaaagatttatttatttattatatgtaagtacactgtagctgtcttcagacacaccagaagagggggtcagatctcattacaggtggttgtgagccaccatgtggttgctgggatttgaactcaggaccttcagaaaagcagtcagtactcttaaccgctgagccatctctccagccccctccatctcctttcttcttcccctctccctctacctgtaaccccctcactccaccctcaaattccacctttctccttccactgcccaatcaccggctctacccttttattgaccagttaaattagggatcaaggtttacacagcatcacttggtgtacatgaggatctgctcatgaggcaaccagattgcgagagctactatttagcattaggatacaagcagcatcaggccaacccactacaagaactcgtgcctctaaaggctcagtggacacccatagtgtctgcagccaggtcagccatggagggcagtagtctgtgtttccgaggccatagtagttcctgtttatgctgccacagtcattttgtacatgagctcatctgtcattgataagagtgtctgggaactagggctgcctgctgtctatagggtaaatcatcttccccacttcatgagagttgtcctaggctgagactacaggttccaccacgtggggcacatcttcacattgtggcccatcagcaaggtctgtccaaggcttcttcccagattcccttgcctccaatcctgtctctcccatgtccacagacatccagccaagtcattgactgtagcccatgaaagcccccaagttctgctctctgggagaatttctcttcaccactgttcttccagggcacatcgggaaggatctgtcttgctgggtacatctcctttggggtgggctttgcttgtcaggcagaaccatgtgtaagccagtctcctcttcttcatctgttcagtctactctcctcatggtaggatcagactgagtgaaagaaggcagtgcagttctgttggggaccagataggtgtatagttcacctctttgtgtgacttgtgctgattggggctgcttgagtttgatttcatgtgacaacgaagtgctgtcatacttgccagacagcacagctcagtgagccaggtgacacctggttcatcttgtggaaagggctgtgagcttagaggcctgtgcgtgagtgatcccagtcgtagatgaaaagatgtttcttaagagcagtgttataggctggaggctcagcagataaaacattagcttcaattcccagaacccgcatggtggctcacaaccatctgtagttccagcttccggggatccaatgccgccctaagcacagacatacatacatgtaggccaaacactcatacacataaaatagaaataaatatatatttatttggctcatatgtttaaatgattgttcctcagttgatggaactgtttgggaaggattgggggtgtggccttgttggaggcgtctgtcactgagggtgggtttgctttctctttctgcctcctacctgtggataggatgcaaactcagtcactgcaccagtgctgtgccatgtcagtgatgtgccaggcctgcctaattaccaccatactctgccatgatggccgtggcctaccctcctgaaactgcaagaaggctcccagttaaattctttcctttagaagctgcctttggtcgtggtgcttcgtcacagcagtagaacagtaactaagtcaggaggacatgaaaacaaaagtggggctggagaggtggctcagcagttttaagagcactgactgctcttccagaggtcctgagttcaattcccagaaaccacatggtggctcacaaccatctgtaatggaatctgataccttcttctggtgtgtctgaagagagcagtggtgttctcatatacattaaataaataaataaatcttaaaaaaaataaaacaaaattggtcctctagggctagggatatggtttactggtctttctgcttttgttttttgagcgaggctctcacacagctcaagcaacatgatgcctcagttcaccatttagcggaggacacagtctgagttgattctgcttttacatgctaagcactagaattacatgcctgcaccacaacaccccttgtatgtcatcctggggatcaaacccagggtcttgggcaggctaggcaaggctctaccaaccgagctacctcttcaacctagaggctggcttagttatcagggtcatgaagattagtcaagaataccaaagctcgagtcaccatcctgctctaggactctcgttgtttccgttctcttctggggcagtgccagatgctggcatccccacagtacatgtggtcaggaccttcgccaagattccacttttgtactgcttccttgatgagggcattgacctcatcttctgtgatggttgtctcattgtcatgaaagatgagggtagaggcagggagccctgagaggaggccgtggtgagggtaaggcagggctggttctgccaggtatgactaagtgccacatgaagtgaggacctcatctgttgcagccttggtttcctcaataggaccatgttactgtatggcatctgggggaaaacttgggtttcccttttaagacataaaaagttagagagagagagagaacgaactaagtgtggtaggtccaggctatcccgggctatacagggatggatatactgtctcaaaaagaaaatgaaacaaaaagcaaattgttaaagcttgagctggtttgagctggtttgagctggttttattttctcagagaacttgggggtggg

SEQ ID NO: 145 - DNA, 892 bp, Mus musculus
gtgatggcggcggccgagcgggcatggggagcagcggtcggtgtagtccggctgtgcaggcggttctgtcatgtagcgactccacacacctttaagaaacaacctctgcatcaatatgcacggagaccacttttcccgctgcgcgcacccttgtgtaacacagtacgattcatgtttattcaaacacaagacaccccaaatcccaacagcttaaagtttataccaggaaagccggttcttgagacgaggaccatggatttccccacccctgctgcagctttccgctcccctctggccaggcagttattcagaattgaaggtgtgaaaagcgtcttcttcggaccagatttcatcacagtcacaaaggagaatgaagagttagactggaatttactgaaaccagacatttatgccacaattatggacttctttgcatctggcttacccctagtgaccgaggagacgcctccgcctccgggagaagcaggctctgaggaagatgacgaagtcgtggcaatgattaaagaactgctagatactagaataaggccaactgtgcaggaggatgggggcgacgtgatctacaggggctttgaagatggcatcgtgcggctgaagctccagggctcctgcaccagctgccccagctccatcatcaccctgaagagcgggattcagaacatgctgcagttttatattccagaagtggaaggtgtggagcaggtgatggatgatgacgaatcagatgaaaaagaagcaaattcatcttaaataatcggcattttctttggccacaaccattggacttatctttactgatcctgtaattatagtctctgctatggaagtttattaataaaaggtttccttcctccagaatgatataaataca

SEQ ID NO: 146 - protein, 255 aa, Mus musculus
MAAAERAWGAAVGVVRLCRRFCHVATPHTFKKQPLHQYARRPLFPLRAPLCNTVRFMFIQTQDTPNPNSLKFIPGKPVLETRTMDFPTPAAAFRSPLARQLFRIEGVKSVFFGPDFITVTKENEELDWNLLKPDIYATIMDFFASGLPLVTEETPPPPGEAGSEEDDEVVAMIKELLDTRIRPTVQEDGGDVIYRGFEDGIVRLKLQGSCTSCPSSIITLKSGIQNMLQFYIPEVEGVEQVMDDDESDEKEANSS

SEQ ID NO: 147 - DNA, 61076 bp, Homo sapiens
  misc_feature (1)...(61076): n = A,T,C or G
gcctgaaccgcagcagccacgtgttcctccaggacctcctcccccaggagcttgctacaagtgctggaaatctggccactgggccaaggaatgcccacagcccgttattcctccttagccatgtcccatctgtgtgggaccccactgaaaatcggactcttcaactcacctggcagccactcccagagcccctggaactctggcccaaggctctctgactccttcccggatcttcttggcttagcggctgaagactgatgctgcccaatcaccttggaagccccctagaccatcatggatgccaagcttcgggtaactctcacagtggaaggtaagcccgtccccttcttaatcaacacggaggctacccactccacattaccttcttttcatgggcctatttcccttgcccccataactgttgtgggtattgatggccaggcttctaaacctcttaaactccccaactctggtgccaacttggacaacattcttttatgcactcttttttagttatccccacctgcccagttcccttattaggctgagacattttaactaaattatctgcttccctgactattcctaggctacagccacacctcattgctgccttttcccccagttcaaagcctccttcgtgtcttcctttcgtatctccccaccttaacccacaattataggatacctnnnnnnnnnnnnnnnnnnnnnnnnnnnnnnnnnnnnnnnnnnnnnnnnnnnnnnnnnnnnnnnnnnnnnnnnnnnnnnnnnnnnnnnnnnnnnnnnnnnnnnnnnnnnnnnnnnnnnnnnnnnnnnnnnnnnnnnnnnnnnnnnnnnnnnnnnnnnnnnnnnnnnnnnnnnnnnnnnnnnnnnnnnnnnnnnnnnnnnnnntacaggttagttcagggatgcacactttatcaaccaaattgttttgcctatccaccctgtagtgcccaacccttacactcttttgtcctcaataccttcctccacaactctctattctattcttgatcttaaagatgcttttttcactattcccctgcaccccttgtcccagcctctctttgcttttacctagactgatcctgacacctatcagtctcagcagcttacctgggctgtactgccacaaggctccagggacagccctcattacttcagccaagctctttctcatgatttactttctttccatccctccgctgctcaccttattcaatatattgatgaccttctactttgtagcccctcctttgaatcttctcaacaagacatcctcctgctctttcaacatttattctccaaaggatatcgggtatccttctccaaagctcaaatttcttctccatccgttacctaccttggcataattcttcataaaaacacacatgctctccctgctgatcgtgtctgactgatctctcaaaccctaacaccttctacaaaaccacaattcctttccttcctaggcatgattggatactttcacctttggatacctggttttgccatcctaacaaaaccattatataaactcacaaaaggaaacctagctgaccccataaatcctaaatcctttccccactcctcttttcattccttgaagatagctttagagactgcccccacgttagctctccctgactcatcccaacccttttcattacacacagccaaagtgcagggctgtgcagttggaattcttacacaaggaccaggaccatgccctatagcctttttgtccaaacaacttgaccttactgttttaggctggccatcatgtctctgtgcagtggctgccaccgccctaatacttttagaggccctcaaaatcacaaactatgctcaactcactctctacagttctcataacttccaaaatctattttcttcctcacacctgatgcatatactttctgctgcactacactacctctcagcaagccaaactcattgccttaactcaagtcctcacccttgcaaaggaattatgtgtcaatatttatactgactctaaatatgccttccatatcctgcaccaccatgctgttacatgagctgaaagagatttcctcactatgcaagggtcctccattattaatgcctctttaacaaaaactcttctcaaagctgctttacttccaaaggaggctggagtcattcactgcaagggccatcaaaaggcatcagatcccattgctcaggacaatgcgtatgttgataaggtagcttaaaaagcagccatcaaaaggcatcagatcccattgctcaggatgatgcttatgctgataaggtagctaaaaaagcagctagagttccaacttctatccctcatggcagtttttctccttttcatctggccactcccacctactccccaactgaaacttccacctatcaatcttttcccacacaaggcaaatggttcttggaccaagggtctccttccagcctcacaggcccattctattctgttgtcatttcataacctcttccatgtaggttacaagccgctagcccatctcttagaacctctcatttcctttccatcgtagaaatctatcctcaaggaaatcacttctcagtgttccatctgctattctactactcttcagggattactcaggcctacatatcaagctcggggccacccaggactggaaaattgactttactcacatgcctcagtgaggaaactaaaatacctcttggtctgggtagacactttcactgggtgggtagaggcctttcccacagggtctgagaaggccaccgcagtcatttcttcccttctgtcagacataattcctcggtttggccttctcacctctatgcagtccgataacggactggcctttattagtcaaatcacccaagcagtttttcaggctcttggtattcagtgaaatctttatatcccttaccgtcctcagtcttcaggaagggtagaatggactaatggtcttttaaaaacacaactcaccaagctcagccaccaacttaaaaaggactggacaatacttttatcacttgcctttctcagaatttgggcctgtccttggaatgctacagggtacagcccatttgagctcctgtatagacgttcctttttattaggccccagtctcattccagacaccataccaacttggactgtaccccaaaaaacttgtcatccctactatcttctgtctggtcatactcatattcaccattctcaactacacataaatgccctgctcttgtttacagtgccggtttacactgtttctccaagccatcacagctgatatctcctggtgctatctccaaaccgccactcttaactccttcttaaagtaaataaataatctttgctggcagggctatgctgaacctccttgggcactctctaattagatgtactgggtcctcccaattcttagtcctttaatacctgtttttctccttctcttattccttttagttttttaattcatgcaaaaccatatccaggccatcaccaatacttctatacaacaaatgtttcttctaacaaccccacaatatcaccccttaccacaaaatcttccttcagcttaatctctcccactctagattcccacgctgcccctaatcccgcttgaagcagccctgagaaacatcacccattctctctccataccaccccccaaaattttcaccgccccaacactttaccactattttgttttatttttcttattaatataaaaagacaggaatgtcagacctctgagcccaagctaagccatcatatcccctgtgacctgcacatacatccagatggcctgaagtaactgaagaatcataaaagaagtgaaaatggcctgttcctgccttaactgatgacattaccttgtgaaattccttctcctggctcatcctggatcaaaagctcccacactgagcaccttgtgacccctacccctgccagctagaaaacaaccccctttgactgtaattttcctttacctacccaaatcctataaaatggccccacccctatctccctttgctgactctcttttcagactcagcccatctgcacccaggtgaaataaacagccctgttgctcacacaaaacctgttgggtggtctcttcacacggatgtgagtgaaacaggtacactatagttttcttctgaaacgtaatttttctttttctagtttcccatttttatcaaggataaatcatagtaggaccaatttatttacaaaataagttttagtcttattgtacttggcctgattatttgcatacaatgctgtaagcgtagtgattgaccatagaggctccttttaaattggctttgtgggaaccatttcataaggaatagcagatttgactttttaaaagcctcttgaggttatccaagccaaggatttatgtatgcctgtagatacctgtatgaattgggggtgaattccacttttcttgaggttccaaagtaacttgagtttcctgggcctgtcagaaagtgacaatctttacttattacaggtcaggaactttgtaaaagaattggatagacatggtaccaggccagtctttccaaagggctttttattggctctataaagtcaatgtcaattcctcaaagcagtcggagtacatctgaaaaaaatgctattccagtcaaagccttgataaaataaccagtgtctcaaattttgtcctgttacaaaagaaaacagattcttactgaatttatgcaaataactatactgctatatattaagaatactcacaaataggccgggtgtggtggctcacacctgtaatcccaacactttgggagactgaggcaggaggactgcttgagctcaggagtttgagagcagcctgggcaacatagtgagaccctgtctctgcaaaaaataaacaaaattagctgagtgtggtgttgggcacctgtagtcacagttacttgcttgggaggctgaggtggaaggatcagtttagcctgggaagttgaggctgcagtgagctgagattgcaccactgcaatcctgcctgggcaacagagtgagaccttgtctcaaaaaaaaaaaaaaaaaaaaaaaaaaaaaagaatctcacaaatagtttccaaattctggggaaatttagagagaaagaatatgcttcaaattttgatcagaaaggtatattttacccaacttgttgtaagctataaatagctcaacagaaaaaagttttcttgactctgtaaaaacaaaacaaaaattatcagcaatgtttcaaacaaaaaacagtcattaaaaattacttcacacacatacaaaaattactttaatattctattggtttagtcccattaattaactcttgttctttttgatgttgggttagcaatcctcatgaatacatcagctttttaattagagtcctggaaagcattttcatagtccaatgctatgatctccaaagttatcggaaacttgtattcaagagtacttgttagagtcctttccatgaatttccttaaagaagaaaattttggactgcagctgattataaactactttttgagaagaatcaaaataaaacaacaattgtctgtggatgacaaaactcttagaacagccatggttaacctaatgctagatgacgagttagtgggtgcagcacaccagcatggcacatgtatacatatgtaactaacctgcacattgtgcacatgtaccctaaaacttaaagtattaaaaaaaaaaaaaaaagaacagccatggttaaagacacaattgacaaggaaatttggttatttctgtggcacacaacgatgtaacataataatcataattattactgatgtcatatactaagacataccagaattacaggaatctcacacaattttgaaacacacattaataactcattcatataaatataacccaaagaaagttaaacaccatttcacatttgacaatgcttcctctcccccacatagcgttctattcccttagtgcctttgttgatttacaaatcttctccaggagctccctgagaccaggaattgttttgttcatcttaatattactccacacaggattttgatcatctgtgagtaacaggaaacctaattaaacagtactgtaggcaaatattgacctaaaagaaagaagctgaggcaaaattaatatagagaatttatttgggccaaggttgaggactgtagccctggccatattgcaggttgccttggagagtgctctgggaaaaaaggagaggctcaactttttaaagaaaaagagacaaatcagggggagaggaacaattacaaaagttgctcatcaggtattctcatttgannnnnnnnnnnnnnnnnnnntgctcatcaggtattctcatttgactttttttttttcttgaaacagggtctcatgctgtcacccaggctggaagtgcagtggtgcaatcacggctcattgcagcctcaacttcccaggctcaggtgattctctcatctcagcctcccaaatagctggcactacaggcatatgccatgacatctggctaattttttgtggagacatggtttgtttgtagagactcccaagtgctgggattagaggcgtgagccacagcacccggccctgatacttttcttttttaggctagtcaatgggcctcataatttaaaggggctcaccttcctcagataacatgtttttattctgccagggttagtggctcatgcttgtaaaccctccatgtttcccagcatggtctcaaactcctgggctcaagcaatttgcccaccttggcctcccagagtgttgggattacaggtgtgagccaccatgctcagcaggtattctcattggtttacagaaataacattgttagtgactggccatgcactgttgaactatagggtacatggcatgttaacggcttcttgacattagtctagtgtatacatagcaagtgacttcaagaagttgttacttagctcaagggcgaatgagatattactgctgctacattttaaatgcctctctgggcctgatactttttctagtgcaggcttgtggtgcaggactggcaggcagctctgctcatggccctggcatgggatccactaggcgaagccagctgggctcctgagtcaggtggggacttggagaacttttatgtctagccagaggattgtatatgtatcaatcagcactctgtgtctagcttggggtttatggatgcaccaatcagcactctgtatctagctaatctggtgggaacttggagaacttttatgtctggctaaaggattgtaaatacaccaatcagcaccctgtgtctagctcaaggtttgtaaatgcaccaatcagtgctctgtgtctagctaacctagtggggacttggagaacttttactctagctagaggattgtaaatacaccaatcagcactctatgtctagctcagggattgtaaacgcaccaatcagcaccctgtcaaaacggaccaatcagctctctgtaaaacaaaccaatcagtactctgtaaaatggaccaatcagctctctgtaaaatgggccaatcagcaggatgtgggtggggtcagataagggaataaaagcagggtgcctgaggcagcagtggcaacctgcttgggtccccttccatgttatgaaagctttgttcttttgctctttgtagtaaatcttgatgtggctcactctttgggcccgtgctgtctttatgaactgtaacacccatcgcaaaggtctgcagcttcactcctgaagtcagtgagaccacgaacccaccagaagaaacaaactccggacacatctgaccatctgaaggaacagactctggacacaccatctttaagaactgtaacactcaccacaagggtccatggcttcattcttgaagttagcgagaccaagaacccaccaattccggacacagtagcacagaggctgtgggtggtttgactagagcaggccctaagaatggtgggacatagaagcctcgtttcaggggtttgaggagtgggaagtgaaaaactagagactaagagtgcagaccatttttttaagccacttggttctgaagggaagaaaagagtgtggaagaggatttggggcaaggcaggatttttcttatgataaggaatccatcagagagggaaaaattgaagtctgagaagaacgattgttccaaggtggaagagccacattttatttttgattgagggtcaaaaacagagccttggactgccttgcggtctagaatgggtgtgtgtgggggggtgnnnnnnnnnnnnnnnnnnnnnnnnnnnnnnnnnnnnnnnnnnnnnnnnnnnnnnnnnnnnnnnnnnnnnnnnnnnnnnnnnnnnnnnnnnnnnnnnnnnnnnnnnnnnnnnnnnnnnnnnnnnnnnnnnnnnnnnnnnnnnnnnnnnnnnnnnnnnnnnnnnnnnnnnnnnnnnnnnnnnnnnnnnnnnnnnnnnnnnnnnnnnnnnnnnnnnnnnnnnnnnnnnnnnnnnnnnnnnnnnnnnnnnnnnnnnnnnnnnnnnnnnnnnnnnnnnnnnnnnnnnnnnnnnnnnnnnnnnnnnnnnnnnnnnnnnnnnnnnnnnnnnnnnnnnnnnnnnnnnnnnnnnnnnnnnnnnnnnnnnnnnnnnnnnnnnncaggtgtgctgtttccattctggtaaaccagtcctctgtcttccagaacagtgattctcaaattttagctggcatcagaatcctgggaagggtttgttaaaacactactaggcagggtgaggtaacctaagagcttttggaggcccaggtgagagggatcacttgaggccagcagagttcaagagcagcccaggcaacacagggagacctcttctctacaaaaatactactactactactgctaataaaagccaggcaccgtggctcacacctgtaatcccagtgctttgggaggctgaggctggaggatgaatcacttgagcccaggagttggttttggtgagctatgatcgcactcctgctctccagcctgggcaacagagatagaccctgtctctggaaaaagaaaaaaaaaaaaagcaagtaacaaagatttctagtccccacctacagagattgtgcctcagtaagtataaagtggggcccaggatttctaacatgttctaacgtgcatttctaacgtgttctcctgcttttttttggcccctagtccgcactttgagaaccgttgtcctagagaaaacggaatactccaggaaggttctggaagaataggtaatgggctttggcactctgccctggaaactagtcaagtctcatgttaatcggagaagggcagcactgtaccagatacatcctctgtgcgggttggtccaagatgaccaagtggcagctgacaagcacagctatgaggaagggttagacacagttccacatcagacccatgggaaaagggcaggagannnnnnnnnnnnnnnnnnnnnnnnnnnnnnnnnnnnnnnnnnnnnnnnnnnnnnnnnnnnnnnnnnnnnnnnnnnnnnnnnnnnnnnnnnnnnnnnnnnnnnnnnnnnnnnnnnnnnnnnnnnnnnnnnnnnnggcagtcactgagctgggcctggaggctgagtagggtcctagaggagggaatgggtcaggtttaggggctggaaacagcattcgcaaggcagcaccagcaccagctaaaaacctagccaacagggaaaacaaagtacggaaacacgcatgcgttcacagtgctgcgtgaattaaccaagcgttggcgcaaacgggaaaggttccccggcctctcttggtcagggtgacgcagtagcctgcaaacctcggcgcgtaggccaccgcacttatccgcagcaggaccgcccgcagccggtagggtgggctcttcccagtgcccgcccagctaccggccagcctgcggctgcgcagatctttcgtggttctgtcagggagacccttaggcactccggactaagatggcggcgacggccaggcggggctggggagctgcggctgttgccgccgggctgcgcaggcggtaggtgacgagcctggagctccgaataggtgtgccgctgggcttagccagcggagcggtcgccgccttgcagaccctctctcgaggcgggtgggtagtgcatctgatggagccggcgggtccgccctgtcgccgtagttgggggtgagccctgaggctgtctgtgcgggagctcggcgcttctgtggcctaatccgggcggactctctggagcttcctctcaggctcagagacccagttcttgagtctctgcggtacggaagcttgtagagactggctgtagagccagaacggaggagctgttttaaaatcgtgtgcctctcccgcccccaggccctctaccgggtgcattccctcctcttctaaacgcagaatcagaatgtcacacagaagggaagaaaataccttgtctcgtttcctcattttcccagtaaggccctgaaagaggaggtgacatgtccaaggttacacagtttctaagtgatggaattccgacgagaaccaggacccctagattccctgcacccaccaccattaagcccactctgttcccttgttttttccgcctccctgagccctacctttgagtttcacctttcaaagacttctgtgaacattgctaagaggacatttatgtaggtgtaccttaattttacgtctggagaaaatggcctacggagagtttgccctctagagtattagacattgtagtgttaatggtgctcttgaagtttaaatgtatatcctaaaaagatttaagttggtagaattttttgttagttacctcctgtgtttgagtagatgtcttccttgaataatgtaatccactcttactttaaaaaaacaagactttaaacctgtatgttggaatgtgcttcctctttattcattctgctgccttttccctgggctgaagggacgagaatattattcttctagtgcatttccaaattccagagtattcacagatttagatactgagctatagaaaaaggcatttttaccccaaaccttgaactgcactcaattagtaattattgggcaccaattaaataatggtagcagctgccatttattgagcacttactgcatggcctggcactggtttaagcactttacatggattctctggattatttatgaggtagctgtgaaactaatctcattgtagagatgaagaactgaggccattgtgctagcagctagaaatgaagatagtttctccccttaatgagtatgcagtctagcaagaaaaatatattaacaaataatgacagtcatgagtgctgtaatagattcatgtaatttaaagtggtgtgccgggcgtggtggctcacgcctgtaatcccagcactttgagaggtcaagctgggcggattggctgaggtcaggagttcgagaccagtctggccaacatggtgaaactaaaaaaaaaaaaaaaaaagctgggcgtggtggtgtgtgcctgtaatcccagcgagttgggaggctgaggcaggggaattgcttgaaccagggaggtggaggttgcagtgagccaagatcacgccactgcacttcagcctgggtgacagagtgagaaaagcgagattatttccatctcaaaataaagtggtgacagctcttactgtgatcaacactggagctagtgtggggagtggcagtcaggacttcacagattatttgattcccattcagtgttgattccattgttctcttgaatcctcggtgccaatccttttatctctccaatagcatctaagaaactctatgggttacagtcccacagtatcccagtagtcttttgcttatcaatggcatataaagattattgaaggtagtaaacagttcatctgtattttgttaatacttaattggtgcccactctttcttttccacgagaagaattccagttttgtgagagagagaaaaaaatgtggcagccgctgttgcttcttgcctattttaagcagaagataattagataaatgtgatcttgtgtatgatcacaaacaattttggcctttggaaaaaattttaacagaaaattatgacagtgaaagaccgttctaactgaccatcattttgcctttaacctctagactgcccattcccgggcttgggccaagctaactttgggagacatttagtttatagtttaaatgataatagccctttcccaaaattaaaccacctttataaagctaatgaaagaccaccaggtttggaggatgagaggagcctgaattctgctaaggtgtagatgtaaatgattaccagccattattctggcggtcctaagagttgcaacttccccaattactcctgcagaaaacatctctcttgtagaacctaagattagccttttcaggtttttgcatttctgactggtcctgtggccccgcccacaaacgggctgagcactcaggaggatcattttccgcacccctatgattgcatccccaaccagtcagcaacacccgttccctggcctgccagtctatccttgaaaacccctagcctcagatccagagagactgagtactaaaactccactctccctttcagctggctccatgtgaattaaactctttattgcaaatcccctgtcttgatgaattagcagtatctggacagtgggcaaagtgaacccattggcaattataaatgactcctgtacttaaaatttttctatggctcctatgaagtggcagtggtaatggatagcgatgatattttcaagtaaaccggattttaaagtaaattgcattgggattttaagaatttttactattaaagtctccttttacttccttttccagtaatatttgctttcattttcttcctttgttttcagtttgtcaaagccataaaaaatagccaattaagttttctctgtaagagtgaagtaaagttagaggcctggcgctgtggctcacgcctgtaatcccagcactttgggaggccgaggctagtggatcatgaggtcaggagttcaagaccagcctggccaagatggtgaaaccctgtctctactaaaaatacaaaaattagccgggcatggtggtgggcatctataatcccagctacttgggaggctgaggcggagaattgcttgaacccaggaggcggaggttgcagtgagccaagatcgcaccactgcactccatcctgggcgacagagcaagactccgtctcacaaaaaaaaaaagaaaaaaaaaagtgaagtgaagttacaacactgggttaatatgtttccatccaaaaagcatataaaaggcagggcatggtggctcacgcctataatcccagcactttgggaggccaaagtgggaggattacttgagccaggagctggagatcagcctgagcaacatagtggtaatccatctctaccagaagtaaaaaaaaaaaaaaaaactagctgggcatggtggcatacagctgtagtgtcacctacttgggaggctgaggtgggagaatcacttgagcctaggatgttgaggctgcagtgagccctgatcacaccattgtactccagcatgggtgacagaacaagaccctgtctcaaaacaaaacacgaaaagcgtgatcaagatcgttggctgtgtaatcccagcattttgggaggccaaggcaggtggatcactttaggtcaggagttggagatcagcctggccaacgtggtgaaaccctgtctctactaaaaatataaaaattagccgggtgtgatggtgtacacctgtaatcccagctactagggaggctgaggcaagagaatcacttgaacccaggaggtggaggttgcagtaagctgggatcgcatcactgcactccagcgtgggcgacaaagtgagactcagtctcaaaaaaaaaagacgggccaggtgtggtgtctcatgcctgtaatctcagcactttgggaggccgatacgggaggatcacctgaggtcaagagttcgagaccatcctggccaacatggtgaaaccctgtctctactaaaaagtacaaaaattagccaggcatggtggcgggcacctgtaatctcagctactcgggaggctgaggcagcagaattgctggcacctgggagatggaggttgcagtgagccgagattgtgccattgcactccagcctgggccaacaacagtgagactccatctcaaaaacaaaaaggacagtcgtatacttttttttttttttttttttggagatggagtcttgctctttgggccaggctggagtgcagtggcacctatgcctcctgggttcaagcgattcctctgcctcagcctcccgagtagctgggattacaggcgcccaccaccactcccagctattttttgtatttttagtagagatggagttgcaccatgttgggcaggctcgtctcgaactcctgacctcaggtgatccacctgccttggcctcccaaagtgctggcattacaggcgtgagccaccacccctggcccaatagtatactttcttttagattttttgaagtattgaaatacttttcaaaacaggtaatataggttatcttgagagagggaaacgtaagggacaggaaaggagggaggctttcactatttatgcttttttcccttaccagttttgaaccatgtgactctattgcctaattctaaattttttaaaaaaataaaaaagcttatagttatttgcttccttcctgtataaccaagagtctgggactatgggttataaattactaatgtagatacaattctgtttctttttttttttgaggtagagtttcactcttgttgcccaggctggagtgcaatggcatgatgttggctcactgcaacctctgcctcctgggttcaagcaattctcctgcctcagcctcctgagtagctgggattacaggcatgtgccaccatgcccggctaattttgtatttttagtagagatggggtttctccatgttggtcaggctggtcttgaactcccaacctcacgtgatccacctgcctcggcctcccaaaatgctgggattacaggcgtgagccacctcacccagcccaattctgtttcttatacctcaatgttatattatcctgtgcacacccggttatcaagggtaggaatttccatttgagctctacctgattttgaattgtttgtagatattgcttgcctaagtaagtggaaataatgtagatggaagatgaaaagtcagttctctaattatttctattgcgggttatgtttaaattttacataggtcttttttatacatgagaagtagaaaccaactttaaaagattagagctcttaaaatgtcattcattatgtgcttttaaatgcaggttctgtcatatgttgaagaatccatacaccattaagaaacagcctctgcatcagtttgtacaaagaccacttttcccactacctgcagccttttatcacccaggtaaaatttcacctcttttatagcagttgtgtttcagaaactgatggaactgtgctaggattttgtggatcataaaagatgagaatttgtatattttctatttagaagcctatagatagaatataggaaaaaaagctatatttttcttataggcttctaagtagaaaatgtatttgcaaggatattgtccaatagatctatgaaatctcagtatgttgtataacatatcccctgcaacacaagagttgctcaataaatgatttccaaaatgaaaatactgtagaagttaaaatctgactgggtgtggtggctcatgcctgtaatcccagtactttgagaggctgaggcaggttgatcgcttgagcccaggagtttgagaccagcctgggcaacacagcaaaaccctgtctctacaaaaaatacaaaaaattagctgggcatggtggcgcacacgtgtagtcccagctgcttgggaggctgaggtgggagaatccctttagcccaggagttcaagcttgcagtgagccgtgatcacaccactgtgctccagcctgggtgacaaagtgggaccctgtctcaaaaagaagtttcaaatggggattgtgtttcaaagaattctatgtatttaaagctactgctgtcctttttttggataagaatacccttaaaattagtaaatttctggctttcatccagaccttagaacacaggattttgaatgtagtaaaaaactacattcaaaaaaaagaaagaaaagcttttttgtcaaaattaattactatggttttgttaataatcttgattgttaacgagatatatactttaattttctttaatttgggaaatagatatgatttaaaataatttgaagtgtgatgactgtaatgtagagttagggaagtttaaggggagagggtatgtgtgtctgcatgtgtgtatgtatgtaaatgtatacctatatgtgttatggagctgtaagcatataaattcagcctctcctttccattgctagcttgaacacattcctgtggccatactctggctgattctggctaagggcgtgagttaaatcagggtagaccttaccccttctgtagccaggggccagaagaggaacactttcctgcaggcttgcctgactgcttggatcacagaatagcttagatataaatattgtaaatactgagtaactcagctgattaaaccactttaattggacttttaaactttgtaggactgaaatatgtggtcatataggcttttcaaataggaaacccattaattttagtcattgatattgactttaagcaccactaatctgtattttgggggagtttacatctacctccttaggtacctattagtaccaagcataataggaaaaaataggctggcatggtggctcatgcctataatcccaacactttgagaggctgaggcgggcagatcccttgagcccaagaagttcaagaccagcctcagcaacatggtcaaaccctgtctttacaaaaaaatacaaaaattatctgggcttggtggtgcatgcctgtagtcccagctactcaggaggctgaggtgggagaatcacttgagcctaggaggttgaggctgcagtgagctgtaatcatgccactgcacttcagcctgggcagcagagtgagacactgtctcaaaaaaaaaaaaaggaagaaatattttttatcattctgtcctgtttcctgttgtnnnnnnnnnnnnnnnnnnnnnnnnnnnnnnnnnnnnnnnnnnnnnnnnnnnnnnnnnnnnnnnnnnnnnnnnnnnnnnnnnnnnnnnnnnnnnnnnnnnnnnnnnnnnnnnnnnnnnnnnnnnnnnnnnnnnnnnnnnnnnnnnnnnnnnnnnnnnnnnnnnnnnnnnnnnnnnnnnnnnnnnnnnnnnnnnnnnnnnnnnnnnnnnnnnnnnnnnnnnnnnnnnnnnnnnnnnnnnnnnnnnnnnnnnnnnnnnnnnnnnnnnnnnnnnnnnnnnnnnnnnnnnnnnnnnnnnnnnnnnnnnnnnnnnnnnnnnnnnnnnnnnnnnnnnnnnnnnnnnnnnnnnnnnnnnnnnnnnnnnnnnnnnnnnnnnnnnnnnnnnnnntgaattagttttttagtaatagctttatttattgtcaacagtaaaaagttctgtgatgatgtcattcattttcatactttctactttagatagtatagagtatatgctcttaagtgactttttattttgcatttgtagtttttaccctcaaggatttctaaaaattttgctttctgcaggtgtagtttttctcaaattgattgagtagaataaagccagattttttttttttgtcttggctcactgcattttctactgcctgggctcaagcagtcctcttgccttagcctcctatgtagctggaattataggcacatgccaccacagctgaccaatttttgtatttttttgtagagacaggatctctgttgcccaggctggtctcgaacttctgccctcaagtgatcctcctgccttggcctcccaaagtgctgggattataggtgtgagctgatgcacccagttgaagccagatttaatttttcaaatattggtagagtactgtgtgcagattttggttagcaataaattattaatacaagctgcaagaaatgattggttcagagccagagttagaagattatttacagaaagtgttggcagccctttctttaatgtgtcattgaaaaatcattcccttataacacagattttcagaagaatgtcttactagaaatatacatattttaaatgaagtacttggacattgcggctattttttcattttttaggaattgtctggttgtctaattagaaaaaggatttaaacaaaatgtatgggagttcactttcaatttttttctttatccatgaaatggtttaacttcagctagctggaactgcatggcaaagtacaaaaatggctctcagttgtcaaattagaactttttctgtaatgactaagaaaagcatttttgtaccaaccatatgttttgccaaatttaaactctttcaaatttaaaataaaactgttgctttttgatattctattctctctcctaaaataggtgatgtgaaaattaggacaggaagattgatcttaaatgtattttcctattatgcctggcaatgttagataaggattagcaatatgtacggtggctaagaaagtcagcacctagaaaattgtccagctttgaatcctggctctgtcacttagtagctgagtgacctttagtctccttattataaaataagataaaaatagtaagtattgaaagtactcattgaaagtatgtaaggattaaatgatataatacatgtaaagtgcttagcaccctgcccagtgcatgataggcactgaataatttttttttttttgagacagagtctcactatgtctcgcaggctggagtgcgtggtggctggatcttggctcactgcaacctccctctcctgggttcaagcaattctcctgcatcagccttctaggtagctgggattacaggcgcacatcaccacacctggctaatttttgtatttttagtagacacagggttttaccatgttgaccaggctgttctcgaactcctgacctcaggtgatccgcctgccttggcctcccaaagtgctggggattataggcataacccactgcgcccggccaggcactgaataaattttaattgttatatagtattgtcagtctatttaaatatactgctgtaagatggaggatttctttttactcagaaggttcattttcttttttcttttttctttttgagacagagtcttgctctgttgcccaggctggactgtaatggcgcaatcttggttcactgcagcctccacctcccaggttcaagtgattgtcctgcctcagcctcctaagtagctgggattacaggagcgcactaccacgcctggctaatttttgtatttttacaaatacctctacaaaataaccctacctctacaaaacccctgtagagacggggtttcaccatgttggccaggctggtcctgaactcctgacctcaggtgatctgcccacctcggccttccaaagtgctgggattacaggtgtgagccaccacacctggccttttttttttttttttttttgagactgagtgtcactctgtcacccaggctggagtgcagtggcacattcttggctcactgcaagctccgcctcccatgttcaagtgattctcctgcctcagcctcccaagtagctgggactacagacgcacactaccacgcctggctgacgtttgtgtttatagtagagatgggttttcaccatgttggctaggctggtttcaaactcctgaccttgtgatccacctgcctttacctcccaaagtgctgagattacaggcgtgagccaccatgcctggccttctatttttttttgagatggagttttgctctttttgcccaggctggagtgcaatggtgcgatcccagttaactgcaacctctgcctcccaggttcaagtgattctcctgcctcagcctcctgagtagctgggattacaggcgcctgccaccacgcccggttaattttgtatttttagtagagacggggtttcaccatgttggccaggctggtcaggaactcctgacctcaggtgatccacccgctttggcctcccaaagtgctaggattataggcgtgagccaccacgcctggccagaaaattcattttcttttctttctttctttcttttttttttttgagacctagtctctctctattgcccaggctggagtgcaatggcaggatctcagctcactgcaacccgggttcaatcgattctcctgcctcagcttcctgagtagctgggattacaggcagataccaccacgtctggctaatttttgtatttttttagtagagacggggtttcaccatgttggccaggctggtctcaaactcctgacctcgtgatccgcccgcctcggcctcccaaagtgctgggattccaggcgtgagccactgcccccttcattatgattattcataatgaataatcagatctgtttaatagttttaaaactattaaaatgccagtgccgtcctttcgtcctgcaagctgttgtcataatagcaaggtaggaaattaaagattgtgttatctcctttattgctttagtgaatccattctcaatctaatcatggtcctagaaaaaagatattataagaaaagagttggcgggcacagtggctcatgcctgtaatcccagcattttgggaggccaaggcaggcggatcacctgaggtcaggagttcgagattagcctggccaacatggtgaaacctcatctctactaaaaatacaaaaattagctgggcttggtggtatatgctggtaatctcagctactcaggaggctgaggcaggagaattgcttgaacctggaaggcagagtttgcagtgagccgagatcatgccactgcactccagcttgggcgacagagcgagactcaatctcaaaaaaagaagagtctgtaaagatgtcttttaggctaggcacagtggctcacgcctttaatcctagcactttgggaggccgaggcggatggatcgcctgaggccaggagttcaagaccagcctggccaacatgatgaaaccccttctctacaaaaaatcaaaaattagctgggtgtggtggtgcacacctgtagttccagccacttgggaagctgaggcatgagaatcgcttgaatccagaaagcagaggttgtagtgagccaagattgtgccactgcactctagcttgggtacagtgtgagtccttgtcttgaaacaaacaaaatagatatcttttaaatattccaggaagtaatttgcatagattcttgcttatgttgtattttgttatgttatttactgtaccattaggcaacttaattaatatctctaagcctccgtgtcttcatttgtaaaatgggagtaagagttccttctttacagggttgttaaaggcataaatacatgtaaagcacctgggccaggcatggtggctcatgcctgtaatcccaacactttgggaggctgaggtaggtggatcactcgaggcaaggagtttgagatcagcctggccaacatggtgaaacccagtttaaaaaaaaaaaaattaggccgggcacagtggcttacacctgtaatcccaccactttgggaggctgaggtgggtggatcacgtgaggtcaggagtttgagaccannnnnnnnnnnnnnnnnnnnnnnnnnnnnnnnnnnnnnnnnnnnnnnnnnnnnnnnnnnnnnnnnnnnnnnnnnnnnnnnnnnnnnnnnnnnnnnnnnnnnnnnnncaggagaatcacttgaacttagggggcagaggttgcagtgagccacgattgtgccacttcactctagcctgggggaaagagcgaaactccatctcaaaaaaaaaaaaaattaaaaataaataaataaagcacttggccccggagctggacatgatggcttacacctgtaatcccagcactttactttgggaggccaaggtggaaggctcacttgaggccaggtgtttgagaccagcttgagcaacattgggagattccacctccacagattttttttaaaaaaagcctttggctgggcgcggtggctcacacctgtaatcccagcactttgtgaggccgaggcgggcagatcatgaggtcaggagatcaaaaccatcctgggtaacacagtgaaaccccgtctctactaaaaatacagaaaaaattagccgggcatggcagcgggtgcctgtagtcctagctactcgggaggctgaggcaggagaatggcatgaacctgggaggtggagcttgtagtgagcagagatggcgccactgcactccagcctgggcgacagagggagactccgcctcaaaaaaaaaaaaaaaagcgtttgaccctgtatttggcatataataagcacacaataactttattattactattataaattgctaactttgtctttaaaataatggtggcactttagaaagaagagaatgtagcattttagtgtattaatgtcagcaataagtgatctgtgattatgatagccattggtacaaagtcaccaaatagactatatataggactcctgaattatgaatatgtataagacttaagtgtttactatttctggaatctgtttcataacacaactatttaaataatcagtgtattggctgggcacagtgctcacactctaatcccaacagtttggaaggctgaggtgggaggatcatttgagtccaggaatttgggaccagtctgggcaatagcgtgagaccctgtctctgcaaaaaaatacaaatattaactaggtctgatggtgcacgcctgtagtcccagatacttttgaggcttaaataggaggattgcctgagccctggaatttgaggtcgtagtgaaccgtgattgtgccactgcactccagcctgggcaacagagcaagaccttgtctcaaaaaaaacaaaaacaaaaacaaaaaacccaaaaaccaataaaccagagtgttagtagaaaactatatgcacttaaatatattgagatatatatatatatatatatattttttttttttttttttttttttttagacacagtctcactttgtcaccaggctggagtgcagtggtgcaatctcggctcactgcaacctccgcctcgcaggttcaagcaattctctgcctcagtcacccaagtagctgggattacaggcacccgccaccacgcctggctaatttttgtatttttagtagagacgaggcttcaccatcttggccaggctggtcttgaactcctgacctcgtaatccacccgcctcggcctccctaagtgctgggattacaggtgtgagccactgcgcccggctctatggtgatatatttctttcttatccttataaatgctttgtcagggcaataaagccttgggtttttccccagtttttcttacttcttctgattctctgcaaatgagcacttcatagtccataaacttgttaactgttttttctagaataacattttcttctttttcttttttagtgagatacatgtttattcaaacacaagataccccaaatccaaacagcttaaagtttataccaggaaaaccagttcttgagacaaggaccatggattttcccaccccagctgcagcatttcgctcccctctggctaggtatattactgttttcatttgcttttaccaagaaacataaataactaactgactttggggttaagacaactctgtttaactattgcatttctatgtgcactgcatttttttttaagtgtagaaaataatttcttttcagatgagagattaaaaaaaaaataaggcctgttgcagtgcctcacacctgtaatcctaacactttggaaggctgaagtgggaggattgcttgagtccaggagtttgagaccagcctgggcaacatagagagactccatctctaccacacacacatacacacacacacacacacacacacacacacacacacagagacccatctctacccgccccccccccacacacacacacagcccatctcaccacacacacacacatacacacacacacacacacacacaaatttagctgagtgtgatggtgtgtacctctggtctcagctactcagaaggctgagatgggaagatcgcttgagcctgggaggttgaggctgcagtgagccatgatggtgccactgcactccagcctgggcaacagagtgagaccctgtctcaaaaaaacccaaaaatgttgaggaggctgaggaggtggggatcacttgagctcaggagttggagaccagcctgggcaacatggtgaaaccctgtctacaaaaaatacaaaaattagccaagtgtggtggtatgtgtctgtattcccagctactagggaggctgaggtgggaggatcacttaaacccaggaggttaaggaaactatgagctgtgatgccatgattgtgccattgcattccagcctaggcgagcgagtgagaccctgcctcaaaaaagaaaagaaaaatgagagttgatattaaaaaaattttctcctgtgatatatttgagagatctatagcatgaataaataaaaacttatatttttacttaagaaaaaatattcatcaaattgataaatatggtaaatttccatttcagatcttaaaaaatctgatttttaagaataatgagaacttgcttattttattcataagggtagttgaatctgtagttctttcaagatggaataatttctaaaatactctattcagaactataaatgaaaactagtcagtggggacagttttaaaattcaccagataaaggcatgtttaaaccagtagtccccccttatctgtggtttcactttccctggtttcagttacccaagatcagccatagtctaaaaatattaaatggaaaattccagaaataaacaattcatcagttttaaattgtgctgcttttctgagtagcatggtgaaatcttgctctgtcctccccagggcataaattatcccttttctagtgtatccatgtcatataccctgtctgcctgtgccctcccctctgctgaaccccccaccaccctcgctgcatcattgatcacttagaagccatctcttaaagtagtgatgctggcatattgctggcatattgttataattgttctattttattatcagttgttaatctcttactgtgcctaatttataaattaaactttatcataggtatatatgtataggaaaaaaacataatacttgcagggttcaatactatgtgtagtttcagggatccactgggggcattggaatggatcccctgaggataaggggggactactgtatgttagagatgataaagaacagggccaggtgcggtggctcatccctgtaatcccagcactttgggaggccgaggcgggcggatcatgtcaggagatcgagagcatcctggctaacagtgaaaccccatctctactaaaaatacaaaaaattagccggatgtggtggcgggcgcctgtagtcctagccactcgggaggctgaggcaggagaatggcatgaacccgggaggcagagcttgcagtgagccgagatagcgccactgcattccagcctgggcgacagagcgagactgtctcaaaaaaaaaaaaaaaaaaaaaaaaagcacaaatgataaaattgttgggatgaacctctttttaactgatagagaagttaataataaagaatattagtcagtagagtcagtcagcatcagttgaaattttggggaaccgaagcctcaatctgattgccagggatannnnnnnnnnnnnnnnnnnnnnnnnnnnnnnnnnnnnnnnnnnnnnnnnnnnnnnnnnnnnnnnnnnnnnnnnnnnnnnnnnnnnnnnnnnnnnnnnnnnnnnnnnnnnnnnnnnnnnnnnnnnnnnnnnnnnnnnnnnnnnnnnnnnnnnnnnnnnnnnnnnnnnnnnnnnnnnnnnnnnnnnntttcatattttatttttaactttttatttattttttgagataaggtttcacttttgttgcccaggctggagtgtctggagtgtgatggcgtgatcttggctcactgcaacctccacctcctgggttcaagctattctcctgccttagcctccctagtaattgggactataggcacatgccacctcacctggctaaattcggtattttttgtagagactaggtctcatcatgttgcccaggctggtctcagactcctgagctcaagtgttctgtccttctcggcttccaaagtactgggattacaggctgtttttcgtacttttttgatataagtcacagtaaaaagtgttttacattatgtgtgtgtatgcgtgagatacaaatgtttgatgggatagttttcactattttttcacccttacaatagataatagattcttaaatttcctttcttcatctctttttgttgttctgttttattttattacataaaaccctgtcactacatacatgattccacaactcactactgggttttaaaaaccctaccctagaagttacttgcacatgtgcccaagatacgtgcagggatgtatttactgtcatagacatctgagacatacaagtgaagaaagcaacttgcagaacagtgagtccaatatgatactatgtatataaaagcaaaaaccacagaacaacaaatgcactgacaaaaagatctggaagaatacacacgaaactgataacaggatttggtaggggtagtcaaggggcatttaaattttattgtttgaaacatttacatcaagaatgagttcatattttgtattaaaaaagtaaaagtaaaaaagccccaattaattcagttatagattagttagagattatttctgtcagatgttcagttggcaaaatctcttttcaagttagtcttttgaaaatagtctgtttaggctgggtgtggtggctcatgcctgtaatcccagcactttgggaggtgggtggatcacctgaggtcaggagttgagaccagcctgggcaacatggtgaaaccccatctttactaaaatacaaaaattagctgggcgtggtggtgggcgcctgtaatcccagctacttgggaggctgaggcaggaaaattgcttgaacccaggaggcggaggttgcaatgagccaagatctcaccactgcactccagcctgggggacagagggtgactccgtctcaaaagagaaaaaaaaaaaaatagtctgtttagtgctcagtacagtgcctggcacttagtaggtgtcaaatattggttgaatgaatgattgatagtatagatatagcagtctattcattcaccaggtgatggacatttccatatttttctgtatgtgtggctattttaaatgaagctgctatgaagatttatgtacaagtctttgtggagcacgagtttttatttcttttgggtaaataactaggagtgggattgctaaatcgtagagtaggaatataaaacaaaattggccatgagttgatcattgttaaagctgcaaaggatatgtggagaattttttacttttctctacttttgtgtatgtttaaacttttccataatcaagcattttaatatctcttattttttctttttttgcaggcagttatttaggattgaaggagtaaaaagtgtcttctttggaccagatttcatcactgtcacaaaggtaaacataggattatataaaataagacttgaaatactcttcatttttttctgagtccaatgcctctctctccaacatttccattctttctgttctttaatttttatattttatttttgagacagggtcttactctcttgtcctctaaatgtcacaagaatcaagcgaaatatgctatgtttttctttttcttttctttttcttttttttgagatgaagtcttgctcttgtcccccaggctggagtgtgatggtgcgatcttggctcactgccacctctgcctcccaggtccaagtgattctcctgcctcggcgcccccccccgccaccctgagtagctgggattgcaggcgcctgccaccatgcccagctaatttttatatttttagtagagacagggtttcgccatgttggccaggctggtctagaactcccgacctcaggtgatccacccgcctcggcctccaaattgctgggattacaggcgtgagccaccacgcctataaaaaatatgctatgtttttcaacagtcaaggcagtatctgctagaaagggctgttccatttttgatgtctactagattaatgggacatgaactatttaaatttgaactatgtatccttttaaatctgttaattgacatatatccacggaacttaaatcacttgcctgatagtgtgtgaaaatcaaaaatatttattaaactccccttaagcaaattgaaaggattagtctgagctctttatgtccttaaaagtggacatactgggggccgggtgtggtggctcacgcctgtaatcccagcactttgggaggccgaggtgggcagatcatgaggtcaggagatcaaaaccattctggctaacatggtgaaaccccgtctctactaaaaatacaaaaaaaaagtagccgggcatggtggcgggcgcctgtagccccagctactcaggaggctgaagcaggagaatggcgtgaacccgggaggcggagcttgcagtgagcggagatcgggccactgcactccagcctgggcgacagagcgagactgcatctcaaaaaagaaaaaaaggggacatactgggttagtgacatgttaaatctagtcatctagtccagtattctcttgcggctatttatttagagacaaagtctcactccacacccaggtcagagtgcagtggcatgatctcagctcactgcagcctaagcctcttgagcttaagcagtcatctcacctcagcctccctagtagctgggactatacgtgcataccaccatgtccaactaatttttgtattttttgtagagatagggtttcgccatgttttccaggctggtctcaaatttctgagctcaaacaatctgctcacctcggcctcccaaagtgctgggattaccggtgtgaaccaccacgtccagccccccattcttcagttttctttcttccatattttttaaggagaagaagggatgaacatttatttaatatattcaatgtcggatatggccctagtgctttacatatgttatctaattcttacaactagttattttataagtgggaaattatatatttattttttaaagttatttagttcttttacgtatagcctatgctatataaaaatttttataggtaaaaatgtgattatatcttaaagggttttggtttttttttttttcctatttttcttgattagatttagtaagtcatcttttagctctcttactttcattatttagttaccctatttgaaattgccctagctctacaattttttcttaagtgaaatgacataaccaatagataatatcccaagttagggtatatgttgatacacatatatgtatgtgtgtgtgtatatctatctatctacacatacatatagatgggatcttgctctgtttccccaggctggaatacagtagtgcgatcatgggtcactgcaaccactaactcccaggctcaagcgatcctgctgtctcagcttcccgagtagctgggactacaggtgcatgccactatgcccagctaattttttttttatttttttttattgtagagacagtgtccttctatgttgcccaggctggtctcaaactcctgggctcatgcaatccttctgtctcggcctcccaaaatgttgggattacaggtgtgagccaccacgcctggcccacgttggtatttaatagacggaatactggatttattttgttttcttccagtaatgtttctcatcatggactatcacattttactgaatgtcttcagcaatcgcctgtttctatttctgatttccagttgataattagacttctttatgcatcatttgtgttatttttttctaaatatatatgtatatttgcagcttatatgctgccctttttttctcattcagacaactttagaatattttttctttttattaccaatattttcctatttagtagagcctgctatttactgaagatctgaggtaacactctgatttgttttccaaataatttattacctacaactagtttccattcccaatcactaagatatttcactagttttacttttataaccttagcagtccccatttatctcaccttttatgtactatctctatattgtttcctttttttgttttttgagatggagtctcactccgtcgcccaggctggagggcagtggcacgatctcggctcactgcaacctccgcctcccgggttcaagcgattctccttccttggcctccctagtagctgggattacaggcctctgcaaccacgccggctaatttttgtattattagtagagaaaggttttcaccatgttggccaggctggtctcaaactcctgacctcaggtgatccacccgcctcggcctccccaaagtgctgggattacaggcatgagccaccatgcccagccaaatttctttcataccctttaagtaatatatataagtaaattttttgaatagttgtaggctgttccgtatacttgatcaagcaattacatcctatgttttttttaagagaatgggaatgctctttatcatcttctttaaagacagaaaatccatttaatattttgtcttcacatcatgaaaaacatcctttaatcatttaaatcaaattaaaacaatgaaagtgaatgaattaataataatattattactaatatattaataattatatttaaattaattaaatattaatttttattaattataaattataattatattattaataataataagtgaatgaattaatgaatgggggatctttaagattttatcttctgaaattcgtttaaacaggaccctttaagatgtggagctaatatatattctccagaagtggttgccattgcataggtatagtgtgtatataggaaaagatattttttcttttcctttcctttcctcttttcttttctttttatctcttttcttttcctttcccttttaccttcctctcttcgcctgcctgcttgccttccttcctcctttccttttttctgctgcttttttctcttttttctttcttcctttccctttattatttttaaaaatataaaaagagacgaagtctcgctatgttgcccaggctagtcttaaactcctggactcaagcaatcctcttgcctcagcttcccaaaatgttgggattaggcatgaactaccacacctgaccaggaaaagcttcttaagaggtgtaagggggccaggcgctgtggctcacgcctgtaatccctgcactttgggaggccggggtgggtggatcacgaggtcaggcttcgacctctcaaaatgctgggattacaggcatgaaccaccgtgcccaaccttaaatatcttgtgttatactgcaaattgccttttttactaagtataataattttgaaatatatccatttcaaaaaacatagttctagtttactcattttacgtgctggagagtatttcattataggaataagatatagttaatttgttcctttatgttcaaggcacacacctgtagtcccagctacttgggaggctgaggcaggagaatcgcttgaacccaggaggcggaggttgcagtgagccaagatcacaccactgtactccatccagcctgggcaacagagtgagactccatctcaaaaaaaaaaaagaaaaaagaggtataaggtagtgttctgtatgggtctttgccgttgcctggaaatacagcattttcctttaaatgtttataggaaaatgaagaattagactggaatttactgaaaccagatatctatgcaacaatcatggacttctttgcatctggcttacccctggttactgaggaaacaccttcaggagaagcaggtaacatgttgtattgagtaattaaaatttgtcctttttttagacttttctattttcttcacatttaccttgatttcagaagtcataggaatctagatttctatcatttaatatatttagctctgcaaatttatatatcattttgaaagcttgtgtataaattggcattactctataaaacaaaaattttcaattataaaaattttcaaacatgcagaaaatatcatgctcaccaatttgccctccactcatatctaacaaatgttaattaagttacagaatgggcttttgggaaaaacaaaacaaatgttatcttttgccacagttgctttagactcattttaaataaaatattaaacatacagtgtcagaatatagagcataaagtaaaaaaaagaaaccgctaaaaccactgtacccccatcccttttcccttcctagttccagagatgtgtgaaaacttgttttgttttatactatacatgtaagtctctgcagggaatatataagactagtttttgtttttaagttttaaatctctgttttttttttttttttttttttttagagacagactctcactctgtcaccccagttggagtgcagtgacgcaatgttggctcactgcaacccccacctcccaggttcaagtgtttctcatgcctcagcctcccaagtagctgggattacaggtgtgcaccaccacacccagctaatttttgtatttttagtagagatggggtttcatcatgtttgtcaggctggtcttgaattcctgacctcaagtgatcacctggcttcaacctctcaaaatgctgggattacaggcatgaaccaccgtgcctaaccttaaatatcttgtattatactgcaaattgtcttttttactaagtgtaatatttttgaaacatatccatttcaaaaaacatagttctagtttactcattttatgtgctggatagcatttcattataggaataagatatagttaatttgttcctttatgttcaagtaaagtttttgtactaatttttattgaaaacattgctgtagtgagcatccttatacaagtctgtttatgaatatgtggagagcttctttatttatttgtttatttatttttatttatttatttttggagacagagtcttgctctgttgcccaggctggagtgcagtggcgtgatctcggctcactgcagcctctgcctcctgggttccagtgattctcctgcctcagccttccaagtagctggtattacaggcgcccaccaccatgcctgggtaatttttgtatttttagtagagacagagtttaaccatgttggccaggctggtcttgaactccagacctcatgattcgcctgcctcggcctcccaaagtgctgggattacaggcatgagccatcgtgcccggccttatttttgagacagagtcttgctctgtcatccaggctggagtgcagtggcatgatctcagttcactgcagcctctgcttcccaggttcaagcgatccttctacctcagcctcccgagtggctgggattacaggcatgcaccaccacgcccagctagtttttgtatttttagtagagggggttttgccatgttggccgggctgatcccgaactcctgacctcaagtggattcacctgccttggccttccaaagttgggattacaggcgtgagccaccctgcctggccgagagcttctttagattatgttcctaaaagtggaattgctatatcataagttgatctaattaagcccacattagccgtatattttaagaatttcaatgttcttatatctttgtcatcatttagtgtcttttttttttttttacccgtatgttgggtatacaatggtaccttgtttttttttcttttttttttttgaaacggagtttcgctcttgttgcccaggctggagtgcaatggcgcgatctcagctcaccacaacctccacctcctgggttcaagcgattctcctgcctcagcctcctgaatagctgggattacaggtgcctgccaccatgcccaactaatttttctatttttagtagagacggggtttcaccatgttggctggtctggtcttgaactcctgatccatctgcctcagcctcccaaagtgctgggattacaggcatgagccactgagcctggccggtatcttgttttaattgcatttccttgattaatactgagtgttaagagtttcatatgtttattggccatttacttttcttgtcagtgaattttctatttatatcttttctacttaaaaacaaattgagtcatgtgtctttttttttttttttttgagacagtgacctgctctgtcacccaaactggagtgnnnnnnnnnnnnnnnnnnnnnnnnnnnnnnnnnnnnnnnnnnnnnnnnnnnnnnnnnnnnnnnnnnnnnnnnnnnnnngctgggcgtggtggctcacgcctgtaatcccaggaatttgggaggccgaggcgggtggatcacgaggtcaggagttcgagaccagcctgaccaacatggtgaaaccccatctctactaaaaatacaaaaattagctgggtgtggtggcgcgtgcctgtaatcccagctactcgggaggctggggcagaagaattgcttgaatctgggaggcggaggttgcagtgagctgagatcatgccactgcactccagcctgggagacagggcgagactccatctcaaaaaaataaataaatgaaaattttaaaaaataaataaataaaatttttttgtagaggcctggcacagtggctcacacctgtaatcccagcattttgggaggctgaggtgggcagatcacgaggttaagagatcgagaccatcctagccaacatggtaaaaccccatctctgctaaaaatacagaaatcagctgggcatggtggcacgtgcctgtagtcccagctacttgggaggctgaggcaggagaattgcttgaacttgggaggcagaggttgcagtgagctgacatcatgccattgcactccagcctagtgacagagcgagactccgtccccccgccaaaaaatttttttttgtggagatgagatcttgttaggttgcccaggctggtcttcaagtgatcctcctgcctcagcatcgcaaagtactgagattataagcatgaaccaccgccacctggcccatatgtcttttttatatttatttaagcaggtttttaaaaaatattctgggctggacaccacgccccacacctgtgatcccagcacttggggaggtgaaggcagcagattgtgtgagctcagaaacttgagactagcctgggcaatatggcaaaaccctgtgtttacgaaaaaatacaaaaattagctgggcatggtgatgcgtgcatgtagtcccacctacttgacaagctgaggtgggaggatcgcttgagcccaggaggctgaggctgtagtgagccatgttcacgccaccacactccatcttgggtgatagaactagaccacatctcttaaaaaaaaataaaaagtctcattctctctgtatatatataaatattctgaatattaattctttgttaggtattttcttagcaaatgatatctccctaactgtgacttaacttttcattttgtttatgatgtcttttgtcatacagaaaattttcattttaatgtggttacattagttcatctttttcctttgtggtttatgccttttgtaccttgttttagtaagttatttagtgtaaagcacttggaagagtgattgtacatgaagctccataagtatttgctgatactgttgtatttgttgttgatgaagtttttcctttctccagtatcacaaagatactgtcatatgtgtatgtgtatatgtatttttgttttttaaagttttattttttacacttacatatttaatcactgtgggatttgtttttctatatagtttataataattttatctttttctacataggtaatcaattatcccagtctttcctcatgaatttataatattatacatgggtctttttctaagatgttttttgtccctgtggtctttttgccccccttcctgttttaataacatatggagttttaattataatatctctgtaacaattagtatagtatatgataatatctggaagaaaaagttcctcaattaaaaaaaactttctggtagtctgctcactttattcttccttgtaaatttaatgaccatcttgtaaagtctctaaaaaaccatgtcaagagtttggttgaagttgcattaaatttacagattaaatttgggagaattaacatttcttcaacattgatattttttcatccccaaattttcccatttatgtgagacttctcttatgttcttttcttggtatgagctcatgttagttctaggtactatataggttttgttatcataaagcgttcttcttttgtttagtaagcacttagacatactgattactgtatttcaggcacaattctaagcactttacaagtataaactcacttaattcttaaaataaccttatcagataggaactgttaccacatttcacacatgagaaaactgaggcactgaatggttgagtaatttgctcaaggtcacacaggtagtaagtggcagagatagataagaactttgggcaatctgcctccagcgttcatgctcttaaccactacactgtgctgcctgtatctgttttttgggttttttttgagacagggtcttgctttgttgcccaggctggagagcaatggtgcgatctcggctcactgcaacctccacctcccaggttcaagcgattctcctgcctcagccacctgagcagctgggattacaggcgccaaacaccatgcccgactgatttttgtatttttagtagagatagggtttcaccatgttggccaggctgctctagaactcctgacctcaggtgatccgcccaccttggcctgtcaaagtggtgggattatgggcgtgaaccacctcactcgaccctgtatctgttttaaaataatgttttctaatttggggtgttgggtattggaatactgttgatttttgtatattgatcttatatccgtcaaggttagcactcattagttctagtagttcatcaatgttaataagcattgactacaaaaaccgaacgtttatatgtgcatatacacatatatacactgctatagtttggacacttgtcccctccaaatatcatgctgaaatttgatccccagtgttggaggtggagtctaatgggaggtgagtgggtcatggggatggatccctcaatagtagatgaatgccctctcgaagagccggaggtatgaggggaggggagtgagttcttactctattagttcttttgagagctgagtgctaagaagagtcccagtaacaacatctccttcctgtctcaccatgtgatctctgcatgggccagctccccttcttcttccatgggggtaagcagcttgaggtcctcaccagatgccaagtcttcaacttttctagacatcagaatcaaccaaataaacatttttttctttgtaaattgcacagtctcaggtattcctttatagcaacactaaatagactatgacatgcagaaacatttgtataattatctttaggtgatacaggtatatttttagatatatgtcttgagtcttagagatatgcacaaggcaacatgtagaaacatgttcactgaaatattttttaactataccagcagttaaaaggaatgaactagattgggagataccaacatagaaacataaaaaagaaaatattaagtaaaaaaggaaaattcaaatgtatgtacatttataaatgtatcatttatgaaaatttttagtactacatgaaacagttacatgtattctttatggatccatatgtaaaccttataactttttagagtaatttgtatctactaacattaaaaatgcacaagctaggttgggtgcggtggctaacgcnnnnnnnnnnnnnnnnnnnnttcaagaacggcctggccaacatggtgtaaccccgtctctactaaaaatacaaaaaaattagccaggtgtggtggcaggcacctgtaattccaactacttaggaggctgaggcaggagaattgcttgaacccaagagatggaggttgcagtgagctgaggtaaaagagtgaaactctgtcaaaaaaaaaaaaaaaaaaaaaaagcacaagcctgtttacacaaatatcccaccagtaggaatttatctcataaatataattgcaatagtacattgatgtatgtatgtgtgtgtgtatatatatatatatatatatatatatatatatatatataaaattttatatttttttgagacggtgtttcactgtcacccaggctggagtgcagtggcgtgatctcagctcactgcaacctccgcctcccgggttcaagtgattctcctgcctcagcctctggagtagctgggattacagacacccaccaccactcccggctaatttctgtatttttagtagagacgggatttcaccatgttggccaggctggtctaaaactcctgacctcaagtgatctgcccaccttggcctcccaaagtgctgggattacaggtgtgagccactgagcccagccttttgatatatatttatataagcaaatatgttgcgggattgttagaaatagcagcaaactgtataaacaactgaaataatgaagaaactggcaaagacaaatctatataaaagttactgtgtaccagttttaaatattgaggcatatttgtatatgctaatggggaaagaccttcaagatatattacacagaaaagagcaagatatagaatagtatgtatggtatgatctcatttgtgttaatttatacatgtaaatgtaaacacgtgctgggaagatataaactaaaatgatagttattgtctatggaagggatggtggggaagtagaatttaggtttattgatctaagacagttttagcttttgtgcttcttttcccccaacaaatttatttatttttaattatctattttttttttttttttgaggtggggtctcactctgttgcccaggctggagtgcggtggtgcgatctcggctcactgccacctccacctcctgggttcaagcaattctcctgcctcagcctcccaagtaactgagattacaggcgtgtgccaccacatccagctaatttttgtatttttagtagagacagggttttaccatgttggccaggctggtctcaaactcctgacctcaggtgacgcgtctgcctcagcctcccaaagtgctagggttatagggggaaccactgcgcccagcccttttgtgtgttttcttttcctttttttctttttcttttcttttttttttttttttgagataaagtcttgctctgttagccaggctggaatacagtggtgcgatcttagctcacttcaacctccgccgtctgggttcaagtgattctcgtgtcagcctaccgagtagctgggattacaggcacctaccaccacacccggctaatttttgtatttttagtaaagacagggttttgccctattggccaggctggtctggaactcctgacctcaagtgatgtgcctacctcagcctcccaaagtgctgggattacaggcatgagccatgttttatttattttcttaaaaaactcaatgttaatataatttaattttaggggttgccagaatctagtgtttgttataacgtaatatgaaatctccatatttttggttttctcaaaggctaactttgtgctcagaagatttgtagaacatttcagaggccaggcatggctcatgcctgtaatctcagtactttgaggggccaaggtagaaggatcacttgagcccaggagttgaagatcatcttgggcaaccggattagtctgttctcacgctgctgataaagacatacctgagactgggcaatttataaaggaaagaggtttaattgactcacagttcagcatagctggggaggccttaggaaagttacaatcatggcggaaggggaagcaaacacgcgagtcttcacatgacggcaacaagaagaagtgccaagcaaaagggagaaaagttccttataaaacgatcagatctcgtgagaactcactcactatcacgagaacagcatgagggtaactacccccatgattcagttacctcccaccagctccctcccacaacacatagggattatgggaactgaagttcaagatgagatttggttggggacacagccaaaccatatcagcaacatggcgaggccccatctctacagaaaataaaaaaattgcctgggtgtggtggctcacacctgtggtcccaaactacttgggaggctgaggcaggaggactgcttgagcccaggaggttgaggctgcagtgagctgtgatcaccccactgcactccgcactgggcaacagagtgaaacgctgtctcaagaagaaaaataaaagaacatttcagaaatttccagaaggcttacatctatatttagtatggctggcattttgaaaaccagtaaattgagaaactgaagatgtaacttaacttacaaagtaggtgtgcctttttgtctcaaagtttccatcaaaatcagtttcttttctctgatactttcaatccttgagaacagagaatgtctgcatatttactggcttaaaatttcataccctaacatcattagcatatcaagatgttttagtgtactcatctttatcaccagatgttgagttgattggtattccctaatttttcttcagataatcaaatgaatgtttctgtcatcaatttcccaaaatatatctccataccaagttacatgttctttctatagttttatgtttttaatgaaccatgtagttaaaatcattctgttttaatactcgtacttgcatggctataaaatttctactcttgatgtttttatatgtaattatttctaggatctgaagaagatgatgaagttgtggcaatgattaaggaattgttagatactagaatacggtacgtgctcctctctctacctgaattcaagtgctttggaggcatttttcattatagcaatatagttttagttggccatgagattatagtagattttcaaaataagtgcaagttaatgtaaaccacaacaggtagccgtgacaattgaatttaaagcctgtatcttctctacatttactcaaaattttaaaacatccaatttatttaaacatattcaatgaagaaatgtattcttcacagtctcaatttagatttgatattgttataataccaaatttcttaaaaagaaaaaaaaaagacttaatgtttggcaaggttgtgaagagagaatgagtacctattttcagtatattgcccatacagaataaatgttaagtgagtggagaacagcaggcttctacttttgcttgtagcagaccaatagtcatgctgagaactcccagaaaagctggataaagtacaataaaaagaatttgtttgaaagcattagatagctgccagagcaagcaaaatgtgaggtgccaagatcctggagagaagggaagctcactgagttttcccttcaggcatttgctgttccttgctacatagctagggtagaagaagctgggcagagggcagctgccaagaatcagagaaaccactgggctttcagaaaatttgtttagatgggaagacaaaaattaaaattctgggttaccaatgaaatcttgatttcaaggaccaagatcctagagagcagggaagttaagaaaagtaagcctatagtttttggtttttttttaagacggagtcttgctctgtcacccaggctggcatgcaatctcagctcactacagcctcgcctcccgggttcaagcggttctccagattcagcctcctgagtagctgggattacaggcacaggccaccacacccagctaatttttgtatttttggaagagacagggtttcaccatgttggccaggnnnnnnnnnnnnnnnnnnnnnnnnnnnnnnnnnnnnnnnnnnnnnnnnnnnnnnnnnnnnnnnnnnnnnnnnnnnnnnnnnnnnnnnnnnnnnnnnnnnnnnnnnnnnnnnnnnnnnnnnnnnnnnnnnnnnnnnnnnnnnnnnnnnnnnnnnnnnnnnnnnnnnnnnnnnnnnnnnnnnnnnnnnnnnnnnnnnnnnnnnnnnnnnnnnnnnnnnnnnnnnnnnnnnnnnnnnnnnnnnnnnnnnnnnnnnnnnnnnnnnnnnnnnnnnnnnnnnnnnnnnnnnnnnnnnnnnnnnnnnnnnnnnnnnnnnnnnnnnnnnnnnnnnnnnnnnnnnnnnnnnnnnnnnnnnnnnnnnnnnnnnnnnnnnnnnnnnnnnnnnnnnnnnnnnnnnnnnnnnnnnnnnnnnnnnnnnnnnnnnnnnnnnnnnnnnnnnnnnnnnnnnnnnnnnnnnnnnnnnnnnnnnnnnnnnnnnnnnnnnnnnnnnnnnnnnnnnnnnnnnnnnnnnnnnnnnnnnnnnnnnnnnnnnnnnnnnnnnnnnnnnnnnnnnnnnnnnnnnnnnnnnnnnnnnnnnnnnnnnnnnnnnnnnnnnnnnnnnnnnnnnnnnnnnnnnnnnnnnnnnnnnnnnnnnnnnnnnnnnnnnnnnnnnnnnnnnnnnnnnnnnnnnnnnnnnnnnnnnnnnnnnnnnnnnnnnnnnnnnnnnnnnnnnnnnnnnnnnnnnnnnnnnnnnnnnnnnnnnnnnnnnnnnnnnnnnnnnnnnnnnnnnnnnnnnnnnnnnnnnnnnnnnnnnnnnnnnnnnnnnnnnnnnnnnnnnnnnnnnnnntaagaataattaattggaggccgggtgcggtgcctcacgcctgtaatcccagcactttgggaggccgaggtgggtggatcatgaggtcaggagattgagaccatcctggctaacacagtgaaaccctgtctctattaaaaatacaaaaaattagccgggcatggtggcgggggcctgtagtcccagctactcgggaggctgaggcaggagaatggcgtgaacctgggaggcggagcttgcagtgacccaagattgcaccactgcactccagcctgggcgacagagtgagactctatctcaaaaaaaaaaaaagtaaccctggaactaaaattataataactgaacttaagaactcattagattggacatagttgaagagaagattagtatactggaatttaagtcagtagaaaatattcagcctgaagcacagggagagaagagaatagaagatatgggaaagaagcatgagatggtgggcacggtgctcacacctataattccagcactttgggaggctgaggtaggaggattgcttgagctcagaagttagagaccaccctggcaacatagtgagaccttgtctctacaaaaaattaaaaaattagctgggtgtggtggtgtgcacctgtagtctcagctgttcctgaggcgggaagattgcttgagcccgggagattgaggctgcagtgggctgtgatcacaccattgcactctggtcaaggagatagaacaagaccctgtctcaccagaaaaaaaaaaatgaatcaaacctccggaggggagaaatagaataaaaaataattcatcaatctgaaacaatgcaaaataggaaacagtaaatggtaatataaactcaaaagtgttggcatttaaatgacagtagtttgatgaacaaaaataagattgtcaaattggatgtgaaaaaacaaaaaaacaaaatcaactatagactgcttagaagagatataggggccaggcatggcggctaatgcctgtaatcctagcattttgggaggccaaggtggcagattgcttgagcccaggagtttgagaccagcctgggcaacatagtgagaccccgtctctacaatgaaagaaagagagaaagagaaagaaagagagagggagggaggaaggaagtgaaggaaggaaggagggagggaggggaaaagaaaagagaagagaaaaggaaagaaatagaatatttgtatgaccttcgggtaggcaatttttttttttttccccaacgggacacaagaaatcagataaagaccgggcgcggtggcttacacctgtaatcccagcactttgagaggccgaggtgaatggatcatctgaggttgggagttcgagaccaccctgaccaacatggagaaaccttgtgtctactaaaaaaataaaaaattagccacgcatggtggcgggcacctgtaatcccagctactcgggaggctgaggcaggagaatcccttgaacccgggaggcggaggttacagtgagccgagatcgagccattgcactccagcctgggcaacaagagcgaaactccgtcttaaaaaataaatatatgtatatatatatcagataaaaatcaaggaaaatacatataaattggactacagtaaaattgtgactgtctcttcatcagaagatgccattggctgggcacagtggcttgtgcctgtaattccagctacttaaaaggctgaggcaggggaggctcccttgagcttaggagttttaggtagcagtgagtgagctgtgatcatgccactgtattccagcctatgtgacaaagcgagactgttgaaaagtgccatttacagtcaaaaggcagggtacagattagaagatatttacagtgtttatatgacaatacataaataacttgtacaaattggtaagaaaaagacaatcagacactggagcaggtacttcgcaaaagatgatcaaatagtggctgggcgcagtggctgacacccataatcccggcactttgggaggctgaggtgagcggatcacctgaggtcaggagttcaagatcagcttggccaacatggtgaaacatggtctctactaaaaatacaaaaaattagctgggggtattggtgcatgcctgtgatcccagctatctgggagtctgaggcaggagaatcacctgtacccgggaggcggaagttgcagtgagctgagatcgtgccattgcactccagcctgggcaacagagtgagactctgtctccaaaaaaaaaaaaggaaaaaagataatcaagtagccactaaacatgaaaaaatgcttaacctcattagttattgtgaatattcaaaccataattaaatatttgtacaaatccagtagaatagttaaaactattaagactgacaacaccaattgttggtgaggatgtggagcaacagaaactctcatacactgctggtgggaatgtaagtttatataactggaaaactatatggcagtatttattaaatctcaacatattcatactctttattcagcaatttcactttcaggtatattcccagtagtaatatatatgcataccaaaagacatttctaagaatctttataactgcactatttgtaaaagccaaaacctaatgttaacctaaatgtctatcaacagtagaatggataaataaattctggtatatttgcttaatggaatactatgcagcagtgagagtaaatgacctagtactatactcagcaacataggtgaatctcacaaagagcataggaagccagatacaaaagagtaattctacgtgatttataaatagaatttatatttgtaaattataaagttcagagactggcaaaactcatcagtggtgatatgaattaggataatggcagcatttttgttgtggggagtgattggaaggaagcccaaaggggacttctggaggtttggtgttgtttcttggtttgggtggttataaatgtgtgttcactttgtgaaaacttagtgaactgtgcatacatgatttaagcatttttctgtattaatgttgtatttcaatgaaaagtttacctgaaaatgaagccagcatgtgacagtctcccttttccttcactcaaaagaagtgactgagtatattttaggtaatcacaataattattaggaaatttgaaatcttaagtgctgtaaaatattgttttatttaaaaaaaatttctttagagacagggtctcgctgtgtcacccaagctggagtgcactggtgtgataatagctcactgcagcttccaactcctgggctcaagcagtcctcctaccttggcctctcaaattgctgggaatataggtgtgagccaccatgcccagccttaaaaagatattagcaagcaagatcaaatgcggtaagcggaggaaatatttgtatgagtgaattttggtattttacctgagagtaaaaaaaaaaaatttaattctaaataaaacttagccacagttattattctgtattataaaagtagctctaactttgtgaattttactaatataaaatttaagctctgagctgtattaaattttttcaatgaaaacttgtattttaaagaatatgtcataaatattctttgacctcacaggccaactgtgcaggaagatggaggggatgtaatctacaaaggctttgaagatggcattgtacagctgaaactccagggttcttgtaccagctgccctagttcaatcattactctgaaaaatggaattcagaacatgctgcagttttatattccggaggtagaaggcgtagaacaggtatgccaatattatatgacagtctagatttttttcattttttctttttctttgtagatacaaaggctggaaatagatgttaaggcaagtatttgaaaagaagttcatgacctagctttttcttcaagggctggatttttgtgttgcaatttttatcagacttgaagtctcttattttagaagtaactttgggctgggcgcagtggctcaaacctataatcccagcactttgggaggctgaggtgggtggatcacctgaggttgggagttccagaccagcctgaccaacatggagaaaaccccgtctctactaaaaatacaaaattagctgggcatggtggcagacgcctgtaatcccagctacttgggaggctgaggcaggagaattgcttgaacctgggaggcggaggttgcggtgagccgagatcgcgccattgcactccagcctgggcaacaaaagcgaaactccgtcaaaaaaaaaaaaaaaatgaagtaactttagtgttatgagaacctactatgtgccaggcatttttgctcatttcatcttctaatgacacagtgcattaagtcattcccattttgcacataaggctacagagactcagagggcatattgctgccctgattgcacaaaaattatgaaaaaggtttaaaatgtaacacagtgttttatagatgagatttagaaatctttagtggaagaactctactacatcatatttaccaatttttttttttttttttttgtagagacggggtcttgctatgttgcccaagttggtcttgaattcctggcctcaggtgatcctcccaaaatgctgggattaaggattaacacaactggcctaatctatgtattcttaaatatgcaagcaagaagcccattaagaaatcatagtttgttgttatactgagtagaattctagagctttacgtgtagcacaatatcaacatttttttttttgccaacatacctaaggagtataacacagcaccttgtcatcagtaataatgagtctcactgcagtgattctcaaccaaaaagcatggccttatggagagagattatcaaggagtgaagggatgtgtggaaattagaaatttccaacccacagaatttcaggtaattcattctttttttttttttttttggagacagaatcttgttctgttgcccaggctggagtgcagtgacacgctatctcggctcactgcaacctccacctcccaggttgaagcagttcccatccctcagcctcatgagtagctgggattacaggcacatgccaccattttttgtattttgtattttagtagagacggggtttcatcatgttgcccaggctgatttcaaactcctgagctcaggcaatttgcccgcctcggcctcccagagtgctaggattacaggcatgagccaccgtgcctgaccacctcaggtaattctgtgcccttaagggctccattgggaatcactcatccttgggtagtattaaaattcatctgttccacagtgagcaggtctatatagacctatccccaaagtcttagggagctgagaggctgaagacagaggctggcaaatccagttggtcagaaagaaacatttaatagggactgaggaacagaagccatttatcgggcagctgcaagatgatggattcctgcattgttacccgctagactcagggcttatataccaggaggaatgggtatacatgcttcagaagatatgtgtaggacaattgaagtcagcccctctggaaaaggcaagaatgctatttgcctaatagcctataatttgcttaagggcaagatttatgctaagtatgtgtttgtttaggataacatcaagattattttgacctaaaggcagaattaagtagaaaacttagaggcattcctagaactgagggtagtcaatgtggcagattagcatccaagatggagttgctttagcctccacaccatcgttttggtccagtacatgacatcttctctttgaagtttttatccatcccccacttggaattaagttcttctttgacaggtccaaagcttctgtttttgctttatgtttatgtagctttctgtatctgttttagctttatgtttacgtggaagctccctaagagacttgaaatcatatccaagtctttgtgttcctctgcaacaactagctgtgtgccttacaaatgtcctatacatgctttgtattaagtatttgggaatattattccaaattaaggaataattctgcctaaaatatgagttggttgacaaaattttttggattgggtattgttgaaattggatgtaaaatattaatttcttggaaataaataccaatttttactcaaccaaaaagacagcctatgaaagaattctttttctattgattgtctcagatcagagccagaatctggattttttttttttttttttttgagacgtagtttcactcttgttgcccaggctggagtacaatggcttgatcttggctcactgcagcctccacctcccgagttcaaatgattctcctgccttagcttcccaggtagctgggattacaggcgcgcgccaccacgcctggctaatttttatatttttagtagagatgggggtttcgccatgttgaccgggctggtcttgaactcttgacctcaggtgatccacctgcctcagcctcccaaagtgctgggattacaggcatgagccactgtgcctggcctagattttttttaaaaaaaaaaaccttactttgttccattatcatctatatgccttaaaaaattatgttagttgatactttggtggattgactgaggaacatttttattcaattgtccagggtagggtgatgaattggccttcagattagaaacttgaattggcatctaattgtagtaggtgtggtgaggagaaaaaaacattcttaggtttatgtaactttttccttctccaatggagttagtctgttatcttagtaatacattaactcatggaaagataatagctgttgtaacattttcctgaggcttaaaatgatcttttatctcagtaagactaaaataattagttcctaatatggtggggtttttttgttttgttttgttttttactttccttggggattcattttaataaaaataaatgtttttaaaataacaatttggtatagcttcacagaatatatttaagtaaataagatggttttgaaaaaaagaaaaagtcatttacattagtcttatggctagagaataccagttaaattgtttttttttttttgagacggagtcttgctctatcaccaagctggagtgctctatcaccaggcactaggctcactgcaacctccacctccccagttcatgccattctcctgccttagtctcccgggtacctgggactacaggcgcccaccaccacgaccggctaattttttgtatttttagtagagacggggtttcactgtgttagccaggatggtcttgatcttctgccctcatgatctgcctgcctcagcctcccaaagtgctgggattacaggcgtgagccaccgcgcctggccccagttaattatttatagtcttttctgcccagctgagactctgctatgggtagcctctttgagacaaggagaagtgatcaatgctttaattaatttccaaatatttaatttgcttttattttattttattttttttttgagacagagtctcgctgtgttgcccacgctggagtgcagtggcgcgatctcggctcactgcaagctctgcttcccaggttcacgccatcctcctgcctcagcctcccgagtagctgggactacaggcgcccgcctggctaattttttgtattttcagtagagatggggttgcttttatgtttttaggataccgggttatgattcaaaccttgttctttggggctgttgatagatttattcttactggcttgtcatgcctcattatagagtgtatcaggtaaagaagtaatattaaaatcaggaaaacagcaaaatctaatcattttcttaattcttaaattgtctttgttttttggttttaggttatggatgatgaatcagatgaaaaagaagcaaactcaccttaaaataatctggattttctttgggcataacagtcagacttgttgataatatatatcaagtttttattattaatatgctgaggaacttgaagattaataaaatatgctcttcagagaatgatatataaatattgcatgtttgctttacctcatatgagttatttataacctcttgaatcatcttctgtacacgtggattttatccaaggatatttttatttttgtccctcatttcccatggctctttctttgcatatgtgtgaaggagtttaaaatacatttccccccatctaatttatttacttttttccatacaggaagaaacagaatgctttttagaatattctaaaatagctttttgtgaaatatctaaaactatttttactgaagtttttagcttaagaaacagctaaacaagtctgttttaaaaatggtatctggctactagcccccaattaagtagcaaagaactgcttaagaccaaaaaaaagaaatcaaaaatgtccgggtatggtggctaacgcctataatcccagcactttgggaggccgaggtgggcagatcacgaggtcaggagtttgagaccagcctgaacaacatggtgaaaccccgtctccactaaaaatacaaaaattagccgggcgcggaggcacgcgcctgtaatcccagctacttaggaggctgaggcaggagaactgcttgaacccgggaggcggaggtggcagtgagctgagatcacgccactgcactccagcctgggggacggagcgagactccatctcaaaaaaaaaaaaaaaaaaaaaaaaaaaaaaggtgaaaaacttgaaaactaactcccagaatctggacacagtttctattggttaagatggagatggccaaattagaaaaactgcctcagcatgcccagcctttaccttatcaatcagaattgctgaagaaaagagaagaagctgctttggtcctcccactggcttctgactcagagatccaaaatctgtaccatgccagaagtgtgcatcattatttttgtactctaggggtactgctttttcaggtagccaaaagagtgatttagcctcctctctcatttttctacagtaattcagagactgcagttaacagaaaatacagggaaaggaaagatgggaaaaatagttgtgatgcattgcatctctggaattctagtccctcaaattaaggagattaagatagtgatggaaacaggaagaactctagcagttgtgagtgctgggaattgaagtttttacttttatcctttggttcactgaaccaaatagtagggttggagaattcattccttgagatatcatgtatgaatttaatttagacactgggaattgcttcataagcaaggcaacttaacctgccctttagttgaagctacaggaaattgacatcgtggatgagatgccagtaatggcagatcttgtatgtggccatgaaataagtggctgaattggatggaggattagtttattagaagagaggaaattggcctggcgcagtggctcatgcctgtaatcccaacactttgggaggctgaggtgggtggatcacttgaggtaaggaattcgagaccagcctggccaatggtgaaaccttgtctctactaaaaatacaacaattagccaggcaaggtggcatgtgcctgtaatcccagctactcaggaggatgaggcacgaaaatcccttgaacctgggaggcggaggttgcagtgagctgggatcgtgccattgcactccaacctgggtgacagagcgagagtctgtctcaaacaaacaaacaaaaaaacaggaaattattcaattgagaggccaaagaggaagagaggaaagattttctacaaaagcaacagccatgaagaacaaggaggaaaggtgtgggaagaacattctaggcataagaacagtataatcagaattgtaagtgtgaaatgtatttgggaacctcaagaaactaagtatggcttgagtataaagtgaaaatggtgcatgagtaggcagtggtagtatagagagtgccacagaaactcttggttgcctacccaacatacaccctcacttcttgttaaggaaggcactctcagtaggtctcacctcagtcccaggggatagttatgattaaaccagtcactttaactccatttttcttttccagtcattagtctgtgggtagccatatgacctagctctggccagtaaactggaagagaaagtctattggagaattctggaaagattgtctttcctagttaagagagtgtgtatgtgagttaatctctggaaagaaggctcttttttttttcctccatccattccttttcttcctgcttggtacactgtagagtgtgatgttcaaagcaatgacagtcaacttgtaatcatgactaaaaggtggtccactgagaatagcaaagagcaaagaaagggtctggatccttggccttgcacggtggctcacacctgtaatcccaccactttgggacacccaggcgggtagatcacttgaggccaagggtttgagaccagtgtggccaccatggtgaaaccccatctctacttaaaaacacaaaaattagcctggtgcagtggcacatgccacctagtagtcccagctactagggagtctgaggcttgagaatcacttgagcctggaaggtggaggttgcagtgagccgagatcacatcactgcactccaccatgggcgacagcaagactctgtctcaggaaaaaaaaaaaaagggtctggatccttgaggcattgttggccttttggccagactaagaattactcactttcagagtttatatgatgtgagataaatgtttttcttgttttagctattgttatcaggtattctgtaacttgaagctgattgcattctgagagactggtaaatgatggaggacttggtaaatacttttaccgatttttcatttgtggtaaactgccaaatgtcaaccttaaaatgaaaacaggccggccgcggtggctcacacctgtaattccagcactttgggaggctgaggcgggtggatcacctgaggtcaggagttcgagaccagtctggccaacatggtaaaaccctgtctctactaaaaaaatacaaaaattagctgggcatggtggtgggcgcctgtaatcccagatactcgggaggcagaggcaggagaaccgctggaacccaggaggcagaggtggcagtgagccgagatcacgcaactgcactccagcctcggtgacagagcaagacgccatgtcaaacaacaaaaacaacaacaacaaattaacatgtattttttaattaattgaaccactattcaaaggttaagtttaatcaggtaatggtttttattctggaatatttatactgaatttctccctatctaatcccaaagaaagactaataatcactattagttgtgtttagccagaacaaaaattaaacaaaaaccaaaaatacaagaaacccccaaaatgtataaaatattttgtatctattttatttttttctttttaaaatagagatggggtcttactctgttgcccaggctggagttgcagtggtgcaatcatagctcagtgcagcctcaaactcctgggctcaagccatcttcctgcctcagcctcccaagtagctaggactacaggcatgcacaaccatgtccagcttttataaaatattttacatgaaatatcctgaaaacactttgtaaatatgggatgcttcagtaagtatttgaaactaagattattggtcaagagtaagccaggcacttggagggtttttctttttgagacagggtgtcactctactgcccaggctggagtgcagtggcgtgattatgggtcactgcagccttgacttcccagactcaagtgattccccacctccacctctcaagtagttgggactataggtgcgcactaccacacccagctaattttcggttttttttttttttttttttttttttttttttggagagacgggattttaccatgttgctcaggtggatctgcaactcgtgggcttaagtgatccacctgcctcagcatcccaaagtgctgagattacaggcgtgagccaccacgcctggcctgaggatttttcactaaccaaaattaggatgaagccctatgcaggatgacatacagtcacatgagagcaacatatataaaaatagcaaacgttcattgaacattcagtgttcatttattcattgaacatccttcatcctcaagcctgaggttttcacaaagactgttctaagcaccttatatttatgaagtcatttaatcctacgtgatagttaactattgtccctcctccgccccccccaccgcccctgcctttttattttgagacgaagtcttgctctgtcgtccaggctggagtgcagtggcaccatctcagctcactgcaacctcctcctcccaagttcaagcaattcttctggaattacaggcatgcgccaccacacctgactatttttgtatttttggtagagacagggtttcaccatattggccaggctggtccctgacctcaagtgatccacccgccttggcctcccaaagtgctgggattacaggcttgagccactgtgcccggcctattgtccccatttttataaactggaagatggaggcacaaggaaaagtacattgtccattgccatgcaacttgagtggaaaagctaggaacatgaactctggcattctggctgcagggcctatgcacattatagctatactattctgccttaaggaagttgggctcatacccctcttgagtattcctacttgagggaggagagaagctttccttgctttcatagctacttacgagtgggcaagagtctagaaccacagtagacaaaagcagtggtatgtacatgtgtgtccatttttttatgcaggaatatgaaactagttgctttccagtccagagggaatctacacccctcttgggaaatcccagccatatactccattttgccatatcagtgttatctgtgattattccctaggagcttacaagatacacagaagcaacttttcaagtatcccttgaaagaaaccctagaaaaatagtactttttctgtgtccttacgtttcaagtgatctttcagttctaggcagctccctgaatggtccaccccttattgtggctctgttcacatccaacaggacagaaatagtaggttaaaggtaggaccagtttatctcatggttttcaatttgttgactttcttggcagtagaaagagtttctttctcgcagagctagaaaactctgccccagcttctgcctactggaaaaatttggagccacgttggagaggagtattggggagggcatagcttctagttggagttagcatcctttgtcctcaagcctcaggttttctggggggcaatcaggtcatatttgcttgatgcggtggacatatttttttgtgtgccttcttggtgttcttcttttagcaacaccttcccctttcctttgaagaactgcttcctcttgccgtatgtggctatatgactctatagggctttggtggagctgtcctatcacaatgtcttgccttctttgccacaggagtggggcatgtgactcacgctggactggccagaatccttgtctagaatataaaaagtaaggatggaggaatagcctctctcattttgggctgcaagctataaagttgtgattacagagctatttgaggattatttccctgtccatgaggtcagagaggtagttcaagagttctgacaacattctgtccctgggtataaatgtgctgaaagctgtttgtattcctgttctttccaattacgtgagctagtaaatccccttctttagtttgagtggtcttctatttattatttgtcagtgaaagctctgccctctaggcacatctttcaccatgactgtgagaaataaatttgtgagagctgcatccttgaagagctctgtgaaagctctttctgtgggagtgctgccactgaattgggaaatctagtactcatcctgtgggtgaagagtaaccacgatattggaagcaaggaaaaactggatcacatttgtatttttgacaggtccctctggagccaaagtgtgtgggatgaactgcgggaggctaaaggggttcactcaaagggtctttctgaggccttgattggtgccttttgttcttgtcctcatttcttttcacaggcctcaggggctcaacctatttctttttcctttgatacttgctaccatcttctctgtccactggggtacatttctccacaaagctccctaaaaagtaggacatatgtaccccagctccccatattcttatgcaaaggaatttttattttaataattttattgctattactggaattcacataagggttaataaaaatgactacagctatttcaattaaggttcttcgttgcgttagtaatggcaactggaagctctgatggccttcagccatcagatccaatgggactgaatctacgaacagggaaatggacttacataaagagatggtgaatgacacccccttgccatcattactttttttgttgtcgttcagaatgttttgatcaggagagaaaatccattccctcatttgtttgaattagacccagatgtccccttcccttcatagatcatttattttcttctccttcaggccttattcccaaaggtccagttaaggcggagctctgtataaagggaggtcaggcacccaaagtgtgtatcttaactggcgcatggttacaaagagttctttgttgtgttgggttagtgaggttcttcaaggctgatttgggaaaatactgtccttcaaagtttcttctcttttttgtcaaattatttttttatttactttttttttaacttttttttttttttctgagttggggactttccagtctttactgaaaacttttaaaaatttgtatttagacaaattctaaaagacctgtaacactagtttcttcttctcaactgattcataaatatcttccaaaatagtttgttgagtggagatggataagacaaattgatagtcattgtggtggagtagcaggcagaagaagaaagcaaagggttaaatagattactatagttggagcatgagaactctggtagtactgctgacattttctttgtggcattgacaggtttgctgccagtgcacaaagatgttgcttaagcattggaaccataccttggcttttaggtaatacaacggagttctaaccagagccttagatgagggttctgaggctagatgtatatccacagtcttttgtttcttgaattaagaaatgtattattaccaaaaagctcactgttttttttttttttaaactttgctctgggtgatccagggacctgtttaagggattgaaatatcaaaagggcttttaggtgagaaatactctgcttagttaaatgtgacatttttcagcttctctgaggcaagtgaaaaaaggcacttttccccgtaagaagaactgaaagccttatgctcacttaatcatataaccagccatagaaggttaattccgctaagaaaataggactttttttcactcattccaaaataaatttgatcttttactttgtgctgtggtctaaaagtgttgggtatgtaaaatctagttctagcttcaagaaacttacagcccagtgggaaaatacagaaaatcataaaatatcaaagaatatttctttacagtgagtagctcaaagagtaagaggttaatgcatgtctccaagtctgtctaggggggataaaaaaggctttcctgaagaggtagcatctaaacagagacgtggtggggattctatgcagagtaaccaaagtgtgcaaaagatttgagaatcttggcccagttgaggaactacctgttgagcctgttgggagtgtatagggctggaaggacggctaagaccagacacatgaacagcagtcagcaggctaagaccagacacatgaacagcagtcagcactccaggaattctgtgtgccatgtacgtttttgatactactctactctagagccattatagagttctgattactccacatttgactaaagataccatttaaggctgtttaaagcaaatgcccaggtaataaattctcagaaacatcatccctctctaatcaagtctctcttgtcagacatggcgcattaattcatagaatgaatcgttcgtaagtcaaacgcgcggctgttaaagctagggaattcctagccgtctcaggtgggtcatgggaggaggtgggccagcagtttcttacgtccaggctcatagtcggatagttgagccttacattcctcctctacccctccacaataaactgagggttatggaggcaacggatgcggagggcttttaggggccaagcatattacacaaggaattgaattgcttattaccagagaggctgacctttggggctttacagtcaagaattttgttatctctctcctcccacctcaacctaattctttgcaatttttttcagccttatgttccccaggattcccttttcatacttcctgcttttttcctcctctttcctcgcttcgtgcagtgctggcgcctggggcctggggctgcacggggcacgcacccgggctattgctttgctaacaattccatccttctctttccgtcattccctgccaggtgctgagtttctccctcnnnnnnnnnnnnnnnnnnnnnnnnnnnnnnnnnnnnnnnnnnnnnnnnnnnnnnnnnnnnnnnnnnnnnnnnnnnnnnnnnnnnnnnnnnnnnnnnnnnnnnnnnnnnnnnnnnnnnnnnnnnnnnnnnnnnnnnnnnnnnnnnnnnnnnnnnnnnnnnnnnnnnnnnnnnnnnnnnnnnnnnnnnnnnnnnnnnnnnnnnnnnnnnnnnnnnnnnnnnnnnnnnnnnnnnnnnnnnnnnnnnnnnnnnnnnnnnnnnnnnnnnnnnnnnnnnnnnnnnnnnnnnnnnnnnnnnnnnnnnnnnnnnnnnnnnnnnnnnnnnnnnnnnnnnnnnnnnnnnnnnnnnnnnnnnnnnnnnnnnnnnnnnnnnnnnnnnnnnnnnnnnnnnnnnnnnnnnnnnnnnnnnncctggcctcgcgggccgtgtctccggcatcatgtgtggtaagggggccgggagcggggggcgtgttgccgggtggcgctggggtgcggtgcgggtgccgctaaggcccaaggcgactgggcggaagcgggagtgtggagggtgcgaagtctgggtgatgggcaaggggcgcccagtggtggctgcgggggcgggggccggcatccacgggcgggagagggggtggcggccgggagaaaggcacctgagaggaaggcgggccccctttgccgggggctagcgggcgccttggcgcggagaaggaaccgaaaggggagagaaacgcctttattgaaaaaggaggagagagctgagggaattgaggtgtggagggggttgccttcaaaagggcccaccaggtgagtgaggaaacctgtggaacctcgggcgaggtctcttgaacttaccttgcatttttctaaaaatctttaaaaaaatattttacttgtttctggggaggcccaatagaaaacagaccctagctagagccacggtagtgccattaaacgtgatacttcctgccatcccttgtctcaacagaaaccattgctaatcaataacttggttcatgggcttagacctgatcctctggtggaagaggccttcaaatgtctgtggcgataggttatacataatttatcatttgcgtgtgcacccattaaaaatgccagctctgaaaaatatcagttataccttggatgtatacccctttagaataccaactatgaaaaatatcatttatcccttgcatgtgcatccattaaaaatactagctatggaaagttgagcaaatatctttcctagagccttaaaaaattaaggttaggcccttttattccatgttttgagagtcgtttattatgacctaagtgttagtgaaagagactttgagaatcgtgtctgacatgactgatatcttctaaa

SEQ ID NO: 148 - DNA, 985 bp, Homo sapiens
taagatggcggcgacggccaggcggggctggggagctgcggctgttgccgccgggctgcgcaggcggtaggtgacgagcctggagctccgaataggtgtgccgctgggcttagccagcggagcggtcgccgccttgcagaccctctctcgaggcgggttctgtcatatgttgaagaatccatacaccattaagaaacagcctctgcatcagtttgtacaaagaccacttttcccactacctgcagccttttatcacccagtgagatacatgtttattcaaacacaagataccccaaatccaaacagcttaaagtttataccaggaaaaccagttcttgagacaaggaccatggattttcccaccccagctgcagcatttcgctcccctctggctaggcagttatttaggattgaaggagtaaaaagtgtcttctttggaccagatttcatcactgtcacaaaggaaaatgaagaattagactggaatttactgaaaccagatatctatgcaacaatcatggacttctttgcatctggcttacccctggttactgaggaaacaccttcaggagaagcaggatctgaagaagatgatgaagttgtggcaatgattaaggaattgttagatactagaatacggccaactgtgcaggaagatggaggggatgtaatctacaaaggctttgaagatggcattgtacagctgaaactccagggttcttgtaccagctgccctagttcaatcattactctgaaaaatggaattcagaacatgctgcagttttatattccggaggtagaaggcgtagaacaggttatggatgatgaatcagatgaaaaagaagcaaactcaccttaaaataatctggattttctttgggcataacagtcagacttgttgataatatatatcaagtttttattattaatatgctgaggaacttgaagattaataaaatatgctcttcagagaatgatatataaa

SEQ ID NO: 149 - protein, 230 aa, Homo sapiens
MLKNPYTIKKQPLHQFVQRPLFPLPAAFYHPVRYMFIQTQDTPNPNSLKFIPGKPVLETRTMDFPTPAAAFRSPLARQLFRIEGVKSVFFGPDFITVTKENEELDWNLLKPDIYATIMDFFASGLPLVTEETPSGEAGSEEDDEVVAMIKELLDTRIRPTVQEDGGDVIYKGFEDGIVQLKLQGSCTSCPSSIITLKNGIQNMLQFYIPEVEGVEQVMDDESDEKEANSP

SEQ ID NO: 150 - DNA, 69050 bp, Mus musculus
  misc_feature (1)...(69050): n = A,T,C or G
ggagttgatctcttgccagagcagccatgtcctgaattaagattcctctaccagaagtgattctacttgtagttgggagtgagtagccattgtctcagaaggaaggagtcaggccatgctcacttaaggtaacagacagcctttgtagcctctttctttctcattcttttaacaacagtttccacttttcctttggaaagctaaactgttgatctctgtttcccaaccctcattttcacaagagcagctgtctcacgctgacctcgaaccctcaccgggaaggcagatctctgagtgctagtctgtactgttcgatgatttcagctgtcagtgggttgagaggcaggcaggcaagtgaggatggaggagaagcctcagtcttgaactgtctgaggtcatttctctgtccttaagattagaggatacttgggaggcagaggcaggtggatttctgagttcgaggccagcctggtctacagagtgagttccaggctatacagagaaaccctgtctcaaaaaaccaaattagaggagatagagtcctacagcactgtctgtggtttctatatagacgtgacccaacccatatgtccctttcatacttaatgttagcgaataaatccttccttcctctaatctaaatggtttttttttttaaagatttatttctttattgtaagtacactgcagctgtcttcagaaaccccagaagagggcgtcagatctcattagggatggttgtgagccaccatgtggttgctgggatttgaactcaggacctctggaagagcagtcagtgctcttaaccgctgagccatctctccagccctaaatgggtttctgttgtcatttataaagtaaaaaaaaaaaaaaaaaaaaagctcaatgttgggaaaaatcaataaaattattggttttccagagtgtgcctgtgtacatatgtaagatattcagagaatgatcacatgcacacacatgcagctatggagtctgagggatcccaaatctgaaggatgggtcgttgagagagaggctcagggttctgaagccttgctgcccctgaggtcttgcttaggcagatgggtctttggtcctagtagcaccttcaactgattggatgaagactatgcccggctgcctgctctaagtccactgaatgaaatgttcatatcatccaaaacatccttccagaatcatctagaatatttgactaaatatctgtttacaatggcccaactaggttaatacatacaattaaccatttcaagtccaccccttgtccactcagaactgctatgaagctcactaaatcataatctccaaatagagctgcagcagggtcatccttccacctaacttggtatgcactgctgaaactctggcccccgaagaggatgccaaggccttccttaataatatgtagcctgagtgctttattgaaaggctaacaaaactatatgctaatgtagtcataccttatgttatctgtaggagatatgaagggaggaaacttccctgaatataaatacacatttacatatacacctatatacacatttatatatacacatacataggcacacatatatatgtatattacacacacacttatacatgctgtatacttccttatgtaatcacataaggaagaaacagggcagttaggctgtctctaactggttacatgcttctggctggtatttaatccctattacacagtttatggttcctttgcctttagcaaagaactcagctaggtgtagtcctgacccagtgaggcaaccctacttcttccttgaaggcacgccccactatcagtcctgcctggattgcgttgttgtgatttccctttgacattaatcataggactcggggaataaaagtggtgtcctccttcctggtgccttctttttcagttttgtaccagagtagtccagttcctacaggataggatctttcactctacctaacaccataactcccctctttgcctctcctgcctgctgatttaggcatgaggagcccagagcagcaggatagcagtcaccttctgggtcaatacagtcactgttgtatgtcccagatacaagtttgtctttcttctggactaagacctatagaccaggagagcataaggaagcaacaattttgcttgtggtcattaggggtaatagtgactgatcacctccaaatggtaccccttttctgggccttcacgccttggctaagttagaaggtgtcacatactagggacagacagctttcaaggtcccttgccttggcatagcaaaggattctcttctggtgttgcaacaaagtcttcaaaagtgatcttcctgttctgtcaagccacctgcttcagatgggagcatggatcagtgaaggcaacgagccaggcccactgctgcccttcagctgtgacttgagtttcctgatcgaagtgccgctgtgtgtgagatatgggggttgtaaatggtcaggtgttgtatttggggaaggcaaatcctcatctggagtattgagtaataaaacaccatgacttccatgaggaaaacacttgtagtatttatttatctttctagctagcctgtaaaaagacacacatcccaggtgttttctttacaacccatagcccaagattgggctggtttggagctattctaatttattccccagccataatgtcccttgttacttgctgtttatcctggccacgtgctcatggtcaatttcccctcatggctgcctcctcctacacctccgtctcctttctttttcttttttaaagatttatttatttattatatgtaagtacactgtagctgtcttcagacacaccagaagagggggtcagatctcattacaggtggttgtgagccaccatgtggttgctgggatttgaactcaggaccttcagaaaagcagtcagtactcttaaccgctgagccatctctccagccccctccatctcctttcttcttcccctctccctctacctgtaaccccctcactccaccctcaaattccacctttctccttccactgcccaatcaccggctctacccttttattgaccagttaaattagggatcaaggtttacacagcatcacttggtgtacatgaggatctgctcatgaggcaaccagattgcgagagctactatttagcattaggatacaagcagcatcaggccaacccactacaagaactcgtgcctctaaaggctcagtggacacccatagtgtctgcagccaggtcagccatggagggcagtagtctgtgtttccgaggccatagtagttcctgtttatgctgccacagtcattttgtacatgagctcatctgtcattgataagagtgtctgggaactagggctgcctgctgtctatagggtaaatcatcttccccacttcatgagagttgtcctaggctgagactacaggttccaccacgtggggcacatcttcacattgtggcccatcagcaaggtctgtccaaggcttcttcccagattcccttgcctccaatcctgtctctcccatgtccacagacatccagccaagtcattgactgtagcccatgaaagcccccaagttctgctctctgggagaatttctcttcaccactgttcttccagggcacatcgggaaggatctgtcttgctgggtacatctcctttggggtgggctttgcttgtcaggcagaaccatgtgtaagccagtctcctcttcttcatctgttcagtctactctcctcatggtaggatcagactgagtgaaagaaggcagtgcagttctgttggggaccagataggtgtatagttcacctctttgtgtgacttgtgctgattggggctgcttgagtttgatttcatgtgacaacgaagtgctgtcatacttgccagacagcacagctcagtgagccaggtgacacctggttcatcttgtggaaagggctgtgagcttagaggcctgtgcgtgagtgatcccagtcgtagatgaaaagatgtttcttaagagcagtgttataggctggaggctcagcagataaaacattagcttcaattcccagaacccgcatggtggctcacaaccatctgtagttccagcttccggggatccaatgccgccctaagcacagacatacatacatgtaggccaaacactcatacacataaaatagaaataaatatatatttatttggctcatatgtttaaatgattgttcctcagttgatggaactgtttgggaaggattgggggtgtggccttgttggaggcgtctgtcactgagggtgggtttgctttctctttctgcctcctacctgtggataggatgcaaactcagtcactgcaccagtgctgtgccatgtcagtgatgtgccaggcctgcctaattaccaccatactctgccatgatggccgtggcctaccctcctgaaactgcaagaaggctcccagttaaattctttcctttagaagctgcctttggtcgtggtgcttcgtcacagcagtagaacagtaactaagtcaggaggacatgaaaacaaaagtggggctggagaggtggctcagcagttttaagagcactgactgctcttccagaggtcctgagttcaattcccagaaaccacatggtggctcacaaccatctgtaatggaatctgataccttcttctggtgtgtctgaagagagcagtggtgttctcatatacattaaataaataaataaatcttaaaaaaaataaaacaaaattggtcctctagggctagggatatggtttactggtctttctgcttttgttttttgagcgaggctctcacacagctcaagcaacatgatgcctcagttcaccatttagcggaggacacagtctgagttgattctgcttttacatgctaagcactagaattacatgcctgcaccacaacaccccttgtatgtcatcctggggatcaaacccagggtcttgggcaggctaggcaaggctctaccaaccgagctacctcttcaacctagaggctggcttagttatcagggtcatgaagattagtcaagaataccaaagctcgagtcaccatcctgctctaggactctcgttgtttccgttctcttctggggcagtgccagatgctggcatccccacagtacatgtggtcaggaccttcgccaagattccacttttgtactgcttccttgatgagggcattgacctcatcttctgtgatggttgtctcattgtcatgaaagatgagggtagaggcagggagccctgagaggaggccgtggtgagggtaaggcagggctggttctgccaggtatgactaagtgccacatgaagtgaggacctcatctgttgcagccttggtttcctcaataggaccatgttactgtatggcatctgggggaaaacttgggtttcccttttaagacataaaaagttagagagagagagagaacgaactaagtgtggtaggtccaggctatcccgggctatacagggatggatatactgtctcaaaaagaaaatgaaacaaaaagcaaattgttaaagcttgagctggtttgagctggtttgagctggttttattttctcagagaacttgggggtggggtggggctcagggtagctaggttacaaaatgctagaagagtctggtaggaagtcactgactgacaaagttgctggaggaaggcctggtaacccgtgtacatcatctgtgtgggagcttaaccttgtggacgaggtaccctggacagggagagctaatcaggtctgcatttgaagggatattctagggagaaggtatgtaggttaagctggggtaattagtggaaccaaaggggcccagtccagaggcctttctatagatgactggtgttgtcatagtgtgtgtgtgtatgtgtgtgtgtgtgtgtgtgtgtgtgcagatatccatgtaagtcaagagtgtggatgtgatgtgtgtgtatgtatgtgtgtgtagatacacctggaatccaggagagagagagagagagagagagagagagagagagagagagagagagaacttgttcatgcatgcaggtgcttatggaagccaggagcaggtgttgtatcccttggagtttgtacgcttagatttttcaaaacctgctttatttagggttcttaaacactccaaccctcctcctagcccaccttctttctagttcactacttctagaggtaagtggaaaaagaaggttaattgggaaaaggaagttgtggacctgttttgaagtagttctttgggggtgatcccactctttgttatcaggataccaacagcccaattcaatagcaaccaccaaacatgaatcagtagcagcagcagatccagcagcaacagcaaggctctgcctgatctgcaggaggcagtggaagcggccaaaagagtcggccaggagcagctgggcaccacgagttctttggtttatttccctctaggaaatgaagagcagtgacgtgttgcctggtggagcaaagctagagcatcctctcactgtctgtggggttctatttatattctttctaaacatcatgtcccctctcaagtgtctgttttcagcaaaacagtccatgccctctctcacaagatggcttccggaaaaaacgtcatgagacacaactgagttgttaaagaaaccagaaatttccatttcaggagctacagtcacagcgagccaccttatttgggagctagaaactgaaccctggtccttcagaaggacagcatgtgttctaaacccctgagcggtctctccagcccggtgtgtcttctgagacaggggcttggctggcctggaagtctctttgctctcaaggatgactttaaactcccgaccctgcctcagccttcagattttcgattttttcttctcacaggcctcaggctgtctctccttccctatttaccgctatctttcctacccactgggtaagatttactacaaaactccttcaaatttcaaacatatgtatcctagcacctctatttcattttacacaatactttcattgctatttattagaatttggataaggggaatgtaggtaaaaggacaaagaaaaacaccttgacccagactttaccccaagaccagggccaagaaacagaatccccatcaacccnnnnnnnnnnnnnnnnnnnnctgctcagttctctgctgcttcttgccctcctgggtcactccccgcccttccctgcaccccatacatctctcgtgtgaagtttgttgtgcagtgtgactgtatggtatccttggctctggaatgccaggagacctctctaagcagagctgtaacacttttttggggggaaacctccccctgctggagcagaactgaaacactttgactgaaggatcagagctgttccactggggttgggggagccttccccccacaggcagagcagagctgtaatacctctgtaagggaagagtttactttcagagctgtgacacttacaggaaacaaaaatcacagagatgaggaaggtcaaaaagtcttaaagcaaggactagctggctagccttatatcaacttgacacaagctagaattgcctgaaaggagggagactcgtttgagaaaaatgtctccataagatccagctgcaaggcattttcttacttagtgattgattggagagggcccgggcccagctcatggcgggtggtgccatccccaggatgatagtcctgggttctataagaaacagactgtgcaagccgtgcagagcaagacagtaagcagcatcccaccatggcctctgcattagcttctgactccaggcccctgtcctgtatgagttcctgtgtggcttccttcagtgattgactacagtgtgaaagtataagccaaataaaccctctcctccccagcttgcttttggtcaccatgttttgttgcagcaatagaagccctaattaagacagagactctccctccttaaatttgttcagtgttgctggttaggagaaaacaaaacaaaacaaaaaaaccgtgttctcagatgttcaaattaggctcagatggcctctttccttcacacagcatttattttctcctctgggtttatttttacaggcccagagaaggcagagctctacacagaggaggggcagtgtctgagctggcacatggttacaaagcattctttgtatggtggtttagtgagcttgttcaaggctgggctggagagcattggcctttaaagtttcctttcagctggtgctgagcacctacccagacagcagcagaacggagatgggtaagataaggaactgtgagtcggtaggcacagctgaacaaagtactgtagctgaaacactttgctggtactactgccatttcctttgtggcatcgacaggtttgctgccagcaaacaagggaggcaaggcaccagaaccacacttcggttcttgtgcagtatcattcaagtcgccttccaggggagggtctctaagaggtcctctaaggaacatgtcactgtgttagctctgccaacgtaatctagggacctgtgtaatggcttggaataatgaagagccttttagatgagaaatacttccttgattactttttctagcctctatttgagataggcgataaaaaaactgaaaagcctttgcttccttgcacatacaaagagcttaggacaagcctataaggcttttatcactctttccagccaccaggacagttttaatttgccacgtattgctctggtctatgactaggcaagtgttggttattaaaaaaaaaaaacaaaaaacaaaaaaccaaccaaccaaacaaacaaaaaaatctcactctatcataaaggaacttaacagtttagtggggagaggaaaaaaaccacctttaatacagaagtctgttatagccgggcgtggtggcgcacgcctttaatcccagcactcgggaggcagaggcaggcggatttctgagttcgaggccagcctggtctacagagtgagttccaggacagccagggctacacagagaaaccctgtctcaaaacaaacaaacaaaaaaaaaacaaaacaaaacaaaaaacaaaaaaacaaagaagtctgttattgtatgagacagatcaaaggatgagatgttaaaaacatcttggggagacctaaagatgtcacacttaaaagtggcaaggatgtgatgtgggactctgtagaataaccctggcgtgcagttttgaatgctggggcagtaggaaggggattctggctgagagtgcttctgtgggccctactcattcatttccgttagagctatcaagtgcgggctgataaccagctacttttgctccaaggtattatttaaaccttctgaaagggaacgccccgctaactcctcttttctcaacggagagttcattcgtgacataagcgatcccgagtacaacgtgcccacagcttccctgagcgcaggcgcagtgctgggactactgactagtggtaccttaggcagagaacagtgaggaaggcagggagtggggcgctgagcaccttgcctacagctcaggtcgtcaccggaatggctgcccgagggcggcctgcaggctcccgcacctctgcgccagcagcgcagttccggccaccgtggctctgcacactgacacgtctgtcccaggctctccctcctgccctacagcttttctctctgtctccctccttcccgttccccttgaaacacacaaactgctgtgtaaacattcccttcctcctcctcctccgaggctcggctcgccctcagcgggcggctccaggaacctaaagcggatgctggtcgagcccctgccacgtcgctacccgcagctctgcgtctgcgcgctgggcgggcgatgcctgcgcgtgagcggcgcgggcgcggcccaatgggagagccgcggcggcgcgcgtggccgggggggcggggcggcagttgagagcgaagcgagcgctgagtcggactgtcgggtctgagctgtcgcatcccagagtcctctcattgccaccaccccggcccgagctcaccctcgcttctgaagctctccgcgcgcccgacagctcagccctcgcccgtgaccaacatcatgtgcggtaagggcagcgatgggggtgtgtggtggccgcagggcccgcgcagtgaagccagaggtggacagcgcgtgtcaacagagcggccttggggctggggtcctgaagagaaggggggcttgtggagcgggcatcccgaggagattgagggtcctgaggggagccgggatctggaaggagaagggtctctggggagaaaggctgctgtccgtgaggcagggactctaagatggggattccggtgttgaaggggcggccggagctagtgtgcttaagagggaccggcagaggagattgtgggggccctaggagtcagaggctacttaaaggggctagaggattgggggtggggtgggccagggagggtatcagagcgttcaaggggcacctttgcatagagctcagaggatagatgaatacctaccttagaagagctgtgaggctcaaagtgagaccaagtatggagggatgcctaggggaaggtccaccaggtgagtgaggcgacctgtgaacatgctgtgtggtactgggggttaaactcataaaggcagcttgtcaagtgagtgagtactctttcccttagccacaccccccaaatcccctttttctgtctctttgtaactgggtcccacttggtagcccaggttggcctgtaattcacattgccctgtctcagccttccaagtgttgtgattataagtatgaatgaccactcctggctggtagcatttcttgaatttacttatcttgcagtcttaaaaatacttaattctagtcactttattttaggcaggcctgcgagaactcaagccaacgcactgacagtgataccccacatgacttctgccactcttaagtctctcaacaggaaccattactaaatcaataacttgatgaaatgggctcagagctgatcttgttggaagagagagtagtagtcctggctaaagatcccacatcatgcatgtacacctgtttaacatatgtctttactacaaccattaaaaaaaacaggctcttttattccatattttaaggcttcttatttagctgggcggtggtggtacaacgcctttaatcctagccctcaggagacagaggcaggtggaaatcagtgattttgagtacaacctggttccaagacagctggagcacagttacacagagaaactctgtcttacccctcacccccgccccccattatctaaaagtgttactaaaagataccatgagaattatatatgataccactaataatattgtaaaatgggaatgagccattagtagtatttaaaaagttatatttttacctttccttttaaaaccgacaatgaccactagactaaagagcgtttgtttcttagaaatagtgtcccacgctgtctctcaagcaggtctagatcccagttctccttcagcctcgtgagtgctgagattctaggcatgagccactgtgcctggttcccaagaaagaacacattttagaaagaggtattgtaagacttgtagctgtgtgagaaacattctttgtagtctttcacttgtaagaactcgggaaggggtaggttgtcctcagtgtgtgttttcctgtgtttaatcgtttcgccttctgaaaatgaagagcaggcttaagcttagagattctagattttagaattctaaacatcatggaattactggattagagttgacttcataattaattatacttttactgtttaatagattggttttacaaaacattcataaattagtttcaaattgtgagtagtgaattttcaagctggttagttactagtttgctgtgtttggtagttaacggttttctctctttctttgagactgactctcactagcctgggttggctttgaactcactctgtagctgggaataaccttgaactcctgatcctccttctgcccccaagggctgggatggcaggactctgccaccacacccagctagttaaactatgttggagtgatgagttatgtacctaggcaagtacctggcattctggttgcaggttatttcctcatcttgtaccaggaagaaaagtatttgtatactataaaacaaaaagaaaaaggaatcggatgtagttcatgaagctcagataagaaaggaggaactgttagtcagagtggctgctagtgcaaggcagctattacactgagtttcactgattatgaagaataagtaaatcaatatgctagcacacggtatttgaggcatttctgtttttatttgctgagacagggtttctctgtgttaggcttggttgtcctagaacccagtaacacttttttatattagttttatatatttcccagagaataggtatctattttcaattgtttttttttaaactagtgattcttgccttttttaaaattattttttattttttttgagatacttacctgaaggttattgagggatgctgggactggctgctagggtgacttgtaaatacatactgtttacgctctttagaagtcacactggaggcagccgggcgtggtggtgcaagcctttaatcccagcattggggaggcagaggcagatcggatttctgagttccaggccagcctggtctacaaagtgagttccaggccagccagggctacacagagaagccctgtcttgaaaaccaaaaaaaaaaaaaaaaaaaaaagaagtcacactggatatgaagaagctgtgagctgtgagggaacttgtttgatacacattttctggggaagggagagcttaataggtgtcagggttaatagaaatgagcaaaagaagatgggaagggttttgtaatacttgtttgtgatagtcttctcccagagatccagaattagcaagactaaaggttctagaaacctttaaacctagtaactttgttgggctcatatataaagcttttagttaggaggcctttacttatccttctttagcattgagcaatatttagtgttgtttcctggggcttgggattttcaactgtaactttccggtacctagaaagggtcagaaggtgatgaaggtgatgaagtgcttggtggcactttttgagagaaggctcaagagagttgtctttgaggaaacaaaatgaatgcagatataatggctgcaggtgctgtcacagtactatctgaggcaatctgaaatccatcaggcacaggagagctttgtaactgctctctgttagacctggaatgctccaatgacgggaggattcttaccttgagatacagagactagtgacaagggaggcagtcacctttagtggtgttgttcatcttcagtcagtgtaagtagaagtaaatttgagaactgtgggtctttgtttttgtttttttgagataatgcttaaatggttacctggtaccacagaggtcgggagagggcattggagctcctgaaactgaacttagaatggttgtgaactacctaccatgtagatgttgggaacagaaccaaggtcccctgcaagagtaacatgctcttcacctctgagccatctctttagccctcaaaacattattcttttttaaaaagagatcttacatgtaaaatgtggctgcatagttataatatgaatatatttatgataaaggattagtgtgtataagtcttaaatgtagcattgcctttataaagaaacatcgcactagagatgtggtcatataagtatggtatgtctattacatattatgatgtggcaccataagaaggctcagacagttaatgagaaggaatgatttggggtaggaaatctgcttataactactcttcaatactgcagcaattacaaaagggcgactttaaacttttgtagttactttacgcaggactgcattttgggaagtttaaacaagacaaaagaccttaaattatgagctgaagtagtgacttctttctaggaggccaccatgtgagtatgagtgtctctgtggacttgccctgcctgcttgtcatctcttccccgctactcagatcgaagatgatatcataatcataactggtggattctcttcaccttccctcccttnnnnnnnnnnnnnnnnnnnnnnnnnnnnnnnnnnnnnnnnnnnnnnnnnnnnnnnntttccttctttctcttctctctctctctctcccctctcccctctcccctctcccctctcccctctccctctctccttctttattattcttctttttctcctttttttccaagacaggatttctttgtgtagccctggctgtcctggaattcactctgcagaccaggctgccctcaaactcaaaaagatccacctgcttctgcctcccaaatgcatatgccaccactgcctggttaactcaggggtttccttggaccaatatttcaaaggacagtttaaccaaacgtgataataatgattattggctatagtagtgctgcctttattgagtaaaaagtttttgagttgtaacttttgagtatggtagttcattgaatcaaagattccagtaattggaagatgcaccgtcaccatggaaacacaaggaaagaatctacgcataatcatactttaaatcaatgtgttaaatctgtaggtctgtcacctctagaaactgttctggagacactttcagaaggctctagggttatctagagtcatagattttatggaatgtctatatatattaagggaatttattggaatagcttactgtctatagttccaactaaccaaacaatgaccatctgtgaatgggaaacccaagaatctagaggttgctcagtgccacgaggctgggtgtttcagctggtcttctgtataagctggaatcctgaagaagtaggttccaacacatgtgcaaataagtgcaagcagtcgaagaaaaaaagaacccttcctttttatattgtccttttggcccagattaaagatgtgtaccataatgcctggacctaagttctttacttggaacttgctctgtctgaggaaggccttgaactcagagatctgcttgcctctgtctcctgggattaaaggtgtgaaccaccttgcctgggcctaagattttcatggccactatgtctcaagatctgggtcaaaagtgtgtatcttctagcttcaagatctggaccacaggtgtgccctccatttctagattttaattcattccacatacagtgaagttgacagccaggagtctatcacaacgggtgattcgatttctctactggagacctggggtccccagcaagaaggatcagagcagctacattatggaaacaactaaacatgactccagaggggaggcgttgagcgggacagtggcccatgcttgtcttggggaaatggtatggtgaggggagagcactctggataagagtcttaagagcgacaacactgtgatctgaaaggtgggcctttattcgactttagaataaacaactcagcagtaaaggactttttaaaattatggtgaattttaatgtgaacatcacattagatggtaatggagcatcttaggtgtgataggattctgtagcataatagtcctaattttaaaaaaaacttattttttatatgtatgggtgatctaccttcatgtatgtctgtgtggacagtatccatgaaggctaaaagagggctttggctttgtaggactggagtgacaggcactgccatgggagtgctgggactgcatagtgagaccttgtctcagaaggggccagtgaggtggcccaagtaatagttcccatccccaagagttgtctgtggactccatagtcactggggctgtgcacacctgcactcacatcacacctcagactggggctgtgcacacctgcgctcacatcacacctcagactggggctgtgcacacctgcgctcacatcacacctcagactggggctgtgcacacctgtactcacatcacacctcaaactaacaagaagacttttccgctgggtgtggtggcgcatgcctttaatcccagcactcgggaggcagaggcaggcggatttctgagttcgaggcctatctggtctacaaagtgagttccaggacagccagggctatacagagaaaccctgtctcaaaaaaccaaaaaagaagaagacgacttttccacttgtgacagcagttccagtagtgggtgtttgagatgccaaagagagtttcaactccagtttattgcaacactttccaatacaaaatacaaaccgtgcctttcattggatgaatggataaggaaggtgtgtgtttgtacaacggatacaacttggtctaaaacagtgaagccctgccatttgtagaaatataggtaaagaatttcaggacattgtgctgagtgaaatcaaccagacccagaatggcaaatacactttctaacgtatgtatgaaaatcagtattacccttgtagaagtatggaatagggaagggggcaggggaagagggactttagggatgcagaaggtactaatacctaccaggagccacaccctaaagacagctgattctctctcagcagccatcagttgtccacatctcttcagttaggagtgaaggttcatgaaccctattcctttctatgttagaacaggcaaccacagttattgtgagttgatgagtgcagaggtcctatgtagtgacagttttggaattttgtttccttaaagtacagaactattagaatgtgtttccattttagttccaggtgtggggatatggggctgcagcaactgaccataatttgcctcaagcactagccgaggcatggttttgtcagctgcagatagtttctgtgattgtgtgacatttggaactctgggaacttttcagagagtgtctagaggtggcggtggtagtttctggtgattaggaaggttgcttgtggtagctgtggtcaaagaagaagcaaaaggaaaaacattagattcagggattttcctaattcctctttcccctctattgttgtttctttcctatctagtgttagggggtgaacccagaggggtaaagggggagaaaaaagaagaaccgtcaaagtagcaaggacaccgttttctctggtcctcctctacctctggcttctccagtctgtgctcatccacaatggtacctgaacctgattcaagtcattttgaggcagttatgtatttaggtcagattttttattattattaaattattatattgggttgtagttgaatgatagagcacttgactcaaatgtggtcttcaggtctggaaaaaaagtaaattgtgaagttttgtttttaacacaaaatttatcactaaacactatttatagtagaagtatttagttattttagctctatagttgtaggaactattttgtggcttaaaatactagaaaatgtatatgtgtaatgtaatagtatataggatatagcccacaagtttgctttttaaaaaataaattttacttgacaaaatggcagttaaggaaatagttagctttataagttttgttggaaacaactaaatacttattttgacatatttttgttaatcttttatgtttatataaacttcccttttgaaaaagttaaatggactctaaataatttatttctttttaaaaagtggagccaggcgtggtggcgcgcgcctttaatcccagcactcgggaggcagaggcaggcggatttctgagttcgaggccagcctggtctacaaagtgagttccaggacagccagggctacacagagaaaccctgtctcaaaaaaacaaaaaaacaaaacaaaacaaaataaaaagtggaatctagctttatatttttgcatagcctaaacataattgtgtaaggtttgattcatcaaagttgtccattaaatttttttgcaggtatatttgcttatttaaattaccatgttcctcgaacaagacgagaaatcttggagacactaatcaaaggccttcagagactggaatacagaggatatgattctgctggtatttcctttaaattatattatggggtttggattgattcttgaatctaaatagtatttttattaattttaggagacttaatttgtgtttgctttgttttgtaaatgcaagtcttaagaattttaaattttggtcatgtctaaagggtttgtgaatgtcatttcagcagtattatcatttatgtggatattgcttctcagtgatttcctttaggaataacgttactccagggcttggggaggcgattagtatacatgaagccttgggttcatccctagcaccatgcaagctgggtttggtggctcaggcctgtgatctcagcactgaggaggtaaagccaggaaggtgagttcaaggtcatccttagacaaagtcagccttagactaagtttgaggccagcctgggctgtaggagtctttatcttaaaaaccaaaacaaacattaactataaaaccataaattatgccaggcggtggtggcgcctttaattccagcatgtgggaggcagagacaggtggatctctgagtttgaggccagcctggtctacaaagtgagttccaggacagccagggctacacagagaaaccctgtctcgaaaaaccaaaaaaaaaaaaaaaaaaaaaaaaaaaaaaccaaaaaaacaaaaaaaaaccccgtaaactatggggcatttttgtgggacaacttgtagaacattgtaaaaggtctgcttctaattgtatgtctgcaccatgactacaggcgctggagctacatgtggttgtgagcagcttgatatgggtccagcaactagcctcaggttcctgcatgcacagctcttcacctctcagccatctctccagcctggccctgtaaactcatttttctttttgtgctggagatcggcagagtctgtctgactctggctccctgtcttgggcccaccagaagctcactttcagtggttcctagcgactcatgcgcctcggcaagagttacattcatagctctgtgattcactacagcagaagaatcaagggcgaaatcgggaaaaggagcgggtgtgggatgaagtctgcaggaaagcaggcagcagcttccaagaagcctgctctaccaggatgcacttcatgtccctagcagcaggttgtgatagcacacaggaatgttgtctactaggtaaactccagatgactcagagccagacacacacacacacacacagcagtccatccagaggaacgtaggcacgggagcctttcagggacttggaatccccctgaaatctaagatcccacagggatatcctgtcagtttctcattcctgttttggtaggtatgggaatggaagccaaggttgcacatgcaaggggtgctgggcagttcccagccctgtttctttggtgtttcagttctccgtttttggctttcctaacatagtagcttctcctgggtgatgatgaggtttgctgtcagccttggaggcttttcttttgtctgttgcttaaataggaatgttctgtaagattttttttttcactttttattatttatttgagcttaggtcttgttgtatagcttgggtagacgttttcttcctagtgctgagatgactggcatgaacccccgtttcacccacagaggttgtttgcttagctcacttgtctttgtattttcatggtgagatgacttcatcacctctacattgtaatttacagtccatgtattttgtttgcttaaagtttttgagacagtctttgtagaccctgctggtctcagacttaccatcctcctgcctcagtctttggagtgctaggacttcaggtatgtgctatgacacttgatttgaatatctaatcggtatgagcaagttgcagacctgtgtttccagctgccttctagaaataccttcccgggtagaccacggtgcagtgcacttggctggttcatagctgaactgaacgcactgtggtcctcactgcagacctcattctgttctgcgttccgtccatcagcaatcgtgccacacttccttgaacccaggagggaacctcggctgctgccttctcacgtcccatcggtcccttctgtgcctctcgcttgtctgtgcaaatcaggccttctacatttttgctttgtttcagctgtaatgtcctctttctccctcaccaacccatcctctcctctctgccatttcagagcatttgctagctgtccttgccacgttacttttgttggaaatgaccttcacggtccaagtaagcttttcaagttcttagtaacttaagtctcagaagatgccttcctgatggtgcctactccttccgaggcgagcaccccactttgcacgtctccgctatgcctatgacactttatctcaatttatgtagcggttgcttgtccaagtaatcattcgatcaccattattcttcctctgtctgttttctctaaagactgttagacagggattgagtgctcctcacctctctcctgaccttccttctcaaaccctcttttctgatgctgagtttgaacacaaggccctgtgcatgctaaataagcttttcactgctcagctatgttcccagctgtcacttaacacatagtaggttttcagaaaattcacttggtaaatgagttaattagatgaatgtataatttacctaaattattattacctttttctcatattggtattgttagccagtttctaagtcttgcttttctacctgcctcttgctaatttaggtgtgggacttgacggaggcaatgacaaagactgggaagccaacgcctgcaaaatccagctcattaagaagaaaggaaaagttaaggcactggatgaagaagttcacagtaatgtgcttagtttgattctttcccactctccccctttttgggacatggttgaggaagacttaaaggttgaagagaaggaataaaagtaattttcttactgcttgggtttaaattgttcctgagcttcaaaatacgatcatagcaattagaaaagaaactaggttcagcgggtttggagcaagcacataccccacagtgcagaggcttcaggagcccctcctgaggacggctctggcataggaggcctgctcatgtgtctccacttggcatggcttttactttgcttgataatgaccccaaatgcaagatgctgatgctggcttgccgacttgccagagaagcgtgaagggggagggggggcgttcttacttaaaatggaaagaaggaaaaccaaatgctcactttgctaagaggtacggtaagggtggatctgccgtctaaaattgagaagaaaaaacagattggtgctagttctgctatcgtgcctccagctgaagacacgtgtgtgtgtgtgtgtgtgtgtgtgtgtgtgtgtgtgtgtgtgtgtgtgtgtggtttattcaaatggaaacagtgacactgtaggaaatcccgctatgtgcagagctcagtgccattggagtttcaggtgtccacggagtatcttgaaacacaaaccttgtggtaaggggggctggtatagttttctttaatagaatttatatctacagcattatcaaatactggagtcttaaactttatctcctacagaacaacaagatatggacttggatatagaatttgatgtgcatcttggaatagctcatacccgttgggcgacacatggagaacccaatcctgtcaatagtcacccccagcgctctgataaaaataatggtaggagtagattgcgtgtgctttgaactgattttagtgggcagtgttgggaggggaatccaggtgcttatgttgttactttaatttgctgttcatctggaaatttcaaaacatattcagacagtgtacagaacttaatcccattcctaggttattttggaattccaataataaaaattggcaactcttcaatatgtcaatctttttatgtcctttttttcttgcaatttagtgtgttatttgtaagtttcctgttggttttgtattgctagttacatctactcctgttatatttgtttgtttaaagcagtcttactctgtaggcctgactggcctttgccttgtaccgaagagggcttagtctaggaggtcaggcctgttagggccacagaaccattgtagttagtaatataatagttattctctggtgttgtgacagggtctcactgtgtagccctggctggcctggaactcactatgtaaaccaagctggccttcagctcatagaaatcctcctacctctgccttctgagtgctgttaaaggtatgtgtcaccatacccagtcataattattcttttgatatatgaatttaaagctacactgtatactgtcatgactacatgtaatactgtgaactcttggtaatctatttttaacatttttttcaatcatcatttaataaaaatagatgaaatcgatctctcaggattatatttatttgctcttggaatgctactttgacattttcatgtgacattccaggaatgatctggaccttccccaaatcaatttatagacgctggtaaatatgtaggcattagttcccaagctttatttagtgtcactgggattgttgtagttggaaaggacttatgtttaaactcaaccaagaataaatagagacctgagtgtccaagtagagtagtgctctacaagtgaggagacaggcacaggagacttgctcctttcatcccccagtgcgagggtagtagcttagtggagcagaagtcagaactggtgtgtttcctcatgtacacgctcactaacgctgtgcgcatcagctcagaaacagtgctggggagcgcctgctgatgccgaggagaccactagcagattacttactttttccctggagaagaatccatttatagatttgtataggtgtggtgggtgacagagatgacaggatgaccactaggtcaaagctggcctgggctacatagtaaaaccttgtctcaagaaaggagggctgggagagtgcttgcctcgcatggaggggtcctgggttcaaaccccagggcaaccactaagacaacaaccggaggggaaacacagcgggaagcctatgcgtaatgatagctcttcatagcatttaccagactctaatattcggtcaatacttttatctcctctagaattcattgttattcataatggaatcatcaccaactacaaagacttgaaaaagtttctggtaagcgaggtgaccctggaagacgccctcttctgagagtgggaggtagtttgttggggtgtgcagcgttatgcggacatgttcaagtaattaccataattatctccagggtgtggcgtttcattgcatttctctgctgacagtggaacagaattgatttctctttttttaataatttattttatttttattttatgtgcattggtgtcctgcctaaatgcacgtgtgttagggtgtcagaaattggggttacagactgttgtgagccgccatgtggttgctgggaatcgaatcccagtcctctggaagagcagtcagtgctcccaagtgctgagccatctccaaccccacagttctgattccttacatggcattttgaggacaagctttattctgtagtgtgacagggccatctcagtgtcgtctgttgagtttctgcagtgatgagaactctctgtatctagcattgtgggagctgtgcctataggaccgctgaactgctccgacagagaaactgggttttaagttttagtgtaaataaccatgcatagctaatggatcttcattggacagttgaggatcaccaaataactgttgctcatgaaattagtattttgaatattatatatcctactatattttcattacagtttaattcatatgcggcaaatctaagttaagccttttgagttgtattttgaattctctacaatcagattttaattttgattaaaattaattttaattattttattaactatattaattgattcttatttattaaatttgccattataaattaatttttaggtaatttaaattttgagtagaataaattcagtatgacatcaaaaaaagttagtaattagtaagatctattaggttgatgaggtgactcagtgggtaaagcggttgccagcggacagcggtgagtttgttccctgaaacccacagaaaggtggacagctaaagctgatgatgcctcatggtggtcctctaaccctcaagcacacaccatggtgacacatttagcctgtacttacagacctacacacgcatatatgtgtgcacacaattagaaaggcatttggtttttgagaaaaaaaatcctagaaaatatttgctgcctgggggctggagagctggcccagtggtttagaaaacgcattgctcttcagaagactaattcccatcacccacaggatggaaaacaactgtctgtaactcgcctttcaggggatctgatgcctccttctgagctgagggcaccagtcatattcatgcacagacatacataaatgcatacaatagaaagaaaaaagataatgttgtttttttaaagtgaataaaaagggaccattaaattaaaaaaatttaacattgtatatatttaagtgtgccttttttcccttttctctccttgtaggaaagcaaaggctatgactttgaatctgaaacagacacagaaaccattgccaagctcgtcaagtacatgtatgacaactgggagagccaggacgtcagttttaccaccttggtggagagagttatccaacaattggtattaaaccatactcttaaagattattgtgttaggactaactggggaaataactcatcaggaaagcacttgcaatgtaagtgtgaggactggagttcaggtccccagcacctacataagtgctgggtggctatggtagcctctttgcagttccagctcccaggaggtggtgggcctggattttgcagcgagctgtctggttggctacattagtgaggcagcaaattgtgggttcaagtgagagaccctaccttggtatgtacggcagagaacagtggaaggagacagctagctcaaacctctgtcttctacccatactcacacatgtgcctgcacacctccatttataaccacagccatgtatgcccacacacatactaataaacatgactagcacactcacacatgcaagaaaaagtaattatgctaatattgttttcaagtagctttttaaaaatgtttgatgaacaggaactatgctgggtttttttttaactcataggagtctaacattagacagctatatttgtgagatattttattgtcaatgtgtgtgtgtgagtgaaggcaggagactggcattgggtatcttaaaactgttgttgcttatctttcatgtgagtacaaggggtcagaactcatgctctgtgggtagcatttttccaacagagccatctccccagccctgtgctggtctcctgagtgcttttttaggcttttattacacattcccaggcgcacatagacacacacatatgcacaaacgcaattcaatgcagggaattttgtaaaactgttttttgacttagtaacttgttttccctggatttaccattccatttattttacaatagctatattctaactatttcactgtagttagagggtaaaaaataagtaagtgttggtgacaaaatggctcagtagacaaattgctgtgcaaggctggcaacctgagtttgctctccggaattcacagaggagagagccaactccagaactgttgccctctaacatctacatgtatgttgggtttttttttgtttttttttgttggtatgtgtgtatggggtgggtggtgctccagtgtgcctacatgcgtgaacctgtgtacacacgtgcagaggcaggtgttaacagggagccatctctccacctcattttaataactatggttgtatatagttgtcaagtccaagactgagggtagaaggtggaggtagtggtagtgggtgtgatgggttttggatgtggagcttgactttctgttggctcttccttcctgaacagacaagtagtctgagagagatgtgtctgttgagaaacatgctaggcacacaggtgactctccgctttttcattgagtatcggaacgggagcttggtggtcagagtttgctcacatcagagctcgagtcagtgtctacctaagatgcgggcttggatattagggtgatcttgctgcggcatctaaaatggagacttgttaaaaactaactcaaagtacacaagcgtgaacagaagtgtctgagcagaatgttgtatgtccgaaatgctttgtttgagaatcgctaacgagaatactactgacgcttctttcccccataggaaggcgcctttgctcttgtgtttaaaagtgtccattttcccgggcaagcagttggcacaaggtacaataggttttcttttaaggactaacgctgacatgcgtgttgaaacattcaggttacagggtacttctcagtaacctgtgggtggcccttcaccgtttccgtagaggtctatttttattctcggttccttctctcttttaacagagtctcttaggaaagagaacacattttggcattgtgatttgtctttggtgagcacggtggctctttatgaatttggatatggaatattttttaattttatacccaaagcattaaccttctccatattttttggaaatgcgtgtcagacagattccgaaggaattgtagaaccactggttttgctaggatgtttagaaatgatcatgaaattcttaggacagtaagaacatttaagatctggggggctggagagatagctcagaggttaatagcactggctgcccttccagaggtcctgagttcaaatcccagcaaccacacataggctcaaaaccatctataatgagatctggtgccctcttctggcctgcagtcatacatgcaagcagagcactatacataataaataaataaatcttaaaaaaaaaagaacctttatgatctgaaaacagaaggtcatctttaatcggaaacaggatgcctaaggatgtgttggtgtctgtgtacaatgaaaagttcttcacattaaaagaacagtttaaaatacagtgttagaagatatgagttagtggagtcggtcagacaggaaatatttgagtgtgttgggacacatggcctccctgccagcactcagagccactgtcaggcttgaatgaaagcagccgcagaggaagggcttcactgtctcagtgagattttaatgcaatagtaatttgccagttgaaaattgtttattagaagtaggcaggtgtggcctgggaactcagttttctaatatagttattttgtagttcaattcagaggggaaattaaatcatttgaagagcattaaatttcaaattaaaatgaattttgaattcatacttaaaatgtgtattgttagtgcattatttatggagaaggtttgattctgactcgttgcgtttcaggcgaggtagccctctcttgattggtgtgcggagtgaacataagctttctacagatcacattccgattctgtacagaacaggtaagttgctgcatcacgttgtaagtgtggtgcgggagctctgagacgctgctccatatgctgcagtgaatgttctccggtcggatctgtgtgtactgtgcagacaactacatagttctgtctggacagaaaaagcttgttgtgaacactgacgagagaatttttctctgttgtacatccttagctaggactcagattggatccacatggtggggatcacaggcagaacgaggtgggaatgcactctgcacggatggaagggtttctcctgcttccttcatttactaattctttgtttttgaaatgaacagaggctctaaaaatgtgcttactttatggggaaatgttttggcacttttctaatttgcagaatacatcttgtctgtttgcttttgccatttcgaaagttgcattatttaataactgttttgcaaaaggggaggtttgaggaatatttcaaataaaggctttttttttctctttcctgttttatttaaaatgatatagatgcatgcttatattgggaaaggaacagtgaagtatgcagccatttcctgagacttagcctcactcttgactgaactagatttaaatggtctttatttagtgcgtgacattttattgttatatttacattgatattataattgattttatttaatttgcagccatactttattttttatgtttgagggtttatcattatttattggtcctggggtggcattcaaacccagagccatatatatgctaggccagtattctaccactggcctgtatccccagcccccagcccctaggctggttgtttttttttttttttaagatttatttttaatttttatttatttttattatatataggcatgtgtgtctgcatgtgggtgtgtggatgagagtgaaggtaacttgggaggccagaggcatcagatcccctggggctggagtcataggtgtttctgagctgcctgatccgggttcagggaaccaaacctcagtcttctgaaagaacaggaaatcctcttagccatctctgtagtaccaggttctttacttctttctgttttttgagaggaggttgaaacaggatcttgtatagcctgcactaactcacacactctatgtagcctaggttaacctttagctcatagctttgactgtgcctcccgagtgctgcagtgtgctcccacacctggtctgcctttacacaaactctgaaccattttagtgacttacacacagagggaacaacagtgtacctgtctactaactgctgagggctttccatgtgaaaggtaggggaacgctggcttcagagaagtgaaaccgtaacgattaatatgtagtttttggtttgtagaataacagttaccaaaagaatgccgagcctgctcatcttcggatggctctgggttttgtgttgtacttgagaagagccttgtttctttaaccagccttctgtgcctgtcagtgctcctttctccgctgtctcacttctctcccactgttccccaaaaaagaccagtcccacagtgagagccgagtctgggtccacagctccaggctcctgcatctgcactgcctctgtactatgagtgccatctcatcggctgtgttagtctgggcggtggtggagtacgactttaatcccagcatttgggaggcagaggcaggtggatttctgagttcaaggccagcctgttatacagagtgagttccaggacagccagggctacacagagaaactctatctcaaacaaacaaacaaacaaacaaacaaacaaacaaacaaacaaaaaacttaggtgagggcttcaaaaattggaagaaacatttttcctaggggatgaccctggatagctgtgtttctctagttctagtagacagatggtgtggagcccagtgccatgctgtcacgacaagagatcaggcttggtgggagggctgtagagagagctgtggaccgactttcaggcttttgtcattgtcttcatcttaaagccacctattcccactggaaaatggtttcatttgagggagagaatttccatatgaaaaagaattttatagacatttacagtcagtgacatctcagtttcttttacatatttcaattggggatgcttctcttaacaatgagctcacaagaatttggagtgatgctcagccttaggacattttagagacaaagcaggttgtaattttaaatgttgttctgggcttcacttccacttgctgttcaatttagattttgtgtgttgagacaaagtcttactatatagctgagatgttgattttcctgcctcaacatctagagtactaggattagagggatacacatatgactttactctctttagaaacaattcagtatggttttttaaaaaggatttatttaaaaattttttgagattattttatgtatgagtgtttgcttatatatatgtatatgtctacacaccacaagcatcatgtgagacctgggcttgaactcaggtcttcatgcttaatggctagtctttacccagtgagccatctcatcgtctccctttgctttgattttaatgaatattctaggcctgatttgctgggctgacttgctgttaaaaatctagacaggttttttttttcttattttaaaaaaataatttgccactagcctgtctttttgtctttattttttcattgcacaatattgtttttttttaatttaaaagtcttatgtatgactgttttgcctgcatgtatttatgtgcatcatgagagtacctggtacccaggaggcagaagagggagtctgagcccagaattacagatagatgtgagccaccgcgtggatgctgagaacccagcttgggtcctcttgcagtagcagtgcgtgttctttatctccaagacatgtctctagccctgcagcccctagagttttaaagttattattaatacaattttggatttctggttgaaaagaaatgactttatggagtttacagtgcagcactgttgtctgccatgaaggctttgcgggtgctgtgtctctgccctctctgtctgttctcacttgcttagtgcatggagcccagtgagccacctcactgagaactgctgagttttttggctgctcagcttttttgttgttgactttatgaacagttgtgcctgtttctaaactgtagcatgattttctgtgcttgctaattgtacttaacctctgtgctctaggcaaagacaagaaaggaagctgcggtctttcccgtgtggacagcacgacatgcctgttccctgttgaggaaaaggcagttgaatattactttgcttctgatgcaaggtgagttgccttcaatgagtcaagagaattttcaggaaaacttctccaaaccatgactgtatcttgcaaaaatctaagtgctgagaatagaactgactttggaaagctaagcaagcaagcagcttgccactgcatggcgcctcagctgcagaactctttagttgagacagttgtgctcatcttgtgaggcataggacaataaacactttcctcctacttcagagcatgatggtcactttacgtgtgtattcttagagacctaatgcctttactctggagcttttgtctgtttgtttgttttgttttgtttctgggaggtgtacccaagtattgtaaggaggaggggttgcttttccagcatttaaagttttgggcatttagcctttacatttcaagttaacttacagcataattcttgaacaaaggaagactgaaaatgtaaaagaaagcagactatttacaggcattggtaattccaatactgtaggagtggggataaaatagaaccacccattgtctgcagagactggacatgagaggaaatgagaatgatactgcttagtacttcagggaatgtattatctgagaaacaaactttactgtcttctagatttttcaaatttgtctttgctgtcagtaagcgggtttattacagagttgatagtcaaggctcagactcggaattgctgaagaatattaatattcattcttacatgcttattagcagagccatattataaaagtaattttattcttctataataattgttgtctccaaggcttactgcctcagtgtgctaacctagaccttgtcctggaagcttctgtacaatctaatctagacctagattgttttccacctctgggactggctcacccgtcttagtaattctttcagatctctggctggctggtttaactcacttattctgcctcacactcttcaagctgactgattcaatctgccttctatcttggcttcctgcattgctctgcttggcaacttactcactttggcagtctattttgatcttctggcttcttctcattctctgacttgttctgtcttcacctgggtctagcttgttctctctacaacttgtctctatagaactgttctgggaaaactgacccctcccccagccccacccttctctgcactgctgtcttaagtagcttcccgtttctctctcttctcctgagaattgagtatatcctagtctgtcaaatctttctctgatttgtcgctttgtctgcctctcaattagacatcactttcaaacatgcatgcttccctctacaaactaactttactttcattgtttgggattaaaggtttgtagtaagggcatgtctgtattccagctggaaggattaaaggcgtgtgttgagggctgagccacattacaactggaaacagtttctttcagtaaataccacaatcttgaggttcacagtgttatcaaacatcctacaacaccatatgctagtctcaggagaatggtacaataaaagtactacttggactgccatagtaggggagacacattttaaagcatctatgtggagttcctactgtgacaagagctacacagttcctatagcatgctcccttaaccccttgttagtagatctttttttgttgttttgttttgttttttgtttttttttttttgttttttttttttgagacaggctttctctgcgtagccctggctgtcctggaactcactctgtagaccaggctggccttgaactcagaaatctgcctgcctctgcctcccaagtgctgggattaaaggtgtgcgccaccacgcccgacagatctttttttaagacaacgaagctcaatctgagctgaggggatcaggagatgcttaggtgaaaggtatgggatgagcactcactatgagcttgcaaagggcgcaaagggcgtcaagcagcttgaagagaatcaaggacacttgctgggatgtgcatggcagtttgaggttctcctgagtgccagaagaaggctgaaaaatgatttgttgggtgagggaaataattctcttgatttgcatcaccttttgctgttgacttgggcagaaaagagaacagaggggtgagagaaagtagtggatacttagggatgctgcagaagccagccagagctgatgacagcttgtactcagcagtggcagtgacatggaaggtagcgttcagaaacacttagcggttaaaatggcaggcttaggtgagagttggcaggaagcagaaatagccttgcattttccttttgatgagctgctggttaggttgctatgtaaagggccccttcactcttttgttcacagtgaccacatgtttaatacggccctgtaggaagcgaaggcattacacgtggtataagatgagagttgatgtttgagcttggtccatgcattctatctggttattgataacatctccttgaccattttgtagtgccgtgatagagcacaccaatcgtgtcatctttctggaagatgatgatgttgcagcagtggtggatggccgtctctctatccaccgaattaaacgaactgcaggagaccatcctggccgagctgtgcaaactctccagatggagctccagcagatcatgaagggtgagtaccttgtcatgttaggacttgggatgcttcaagaaaggaagcctctacttccgttatggctgatgaagctgtggagtcttccacatgatgagtggatggtcaacctggaaagggatgactctagagaaacggcctgctggtcttagaatagttgttgaatctaactcatggtctgtttttaactttgtaagaaggagggggtaccaaatgttgaaagatgctttgtaagggtacgaatgcctcatggctgttcagtactcttgttatatctctctgtgcttcagccttctcatgtattgagagggagaaatagactctatcacactaaggtttgaggatcaagaaggctgatctacacaagctcttagaataaatagtgcctgatacctgtgtgccccacataatgtgtactgccgttaactgttagggtttttattctcctttctgacagtgctgtagtagggattatatcatagagctactgtcctcaaagttccatgagccatactacagttcattcaaggaagtaaatactgatcttacttataagtaaggagttttcccggttgacatagtaaaggttaatttgatcatttgaacttaaatttgactcaaaaatttatcctctgcccttattcatataactatgaattttagctactaagcaaataaagtggctttcttccttgttcgtttctcatgtagagtggaaatactcatccaggcttttaggaagtcagtctgaatgaaaatcccttgttgcatggcctttgtttcatctctcaagattaccttgagatagtgtgtttatattgaagaggtagttgattgtgtacagattgcttagcttatttactgttgttttaattatataatttttatttttgtaggcaactttagttcatttatgcagaaggaaatttttgagcagccagaatctgttgtgaacacaatgagaggaagagtcaattttgacgactacactggtaatgacattttatattttgtcatttaagtctcctgagggagtgccattagcaacctgacaaattattgtccttcttatagatttgtggaacagctaagattgccaggtatcaaagtgcgattgcactgtgtattggttgagtcagctcagatttggggacagaaagtgggctggtggggacagaaagtgggctggtggggacaggtgctggggaatggtggagagtcatggtctcctaggtagttttcactgggtatgtgggagagttctagagttggatagcagggctggggctcacagtgtgaatgtgcataatcccactacgaggtgacagtcacacactaggttcttgctgtggttatcagaccttgggcactttgcctgcctgtctgtataatatgtgtaccacatttgtgcttgattctcttggagattagaagaggaactggaacaggagtttgatatagttgggagccatcatgtgtgctctggaaacagaacccaaattctctgcaagaacagcaagtgctcttaaccattgagccatctttccagcccctaggtttctgtcataagtagcaaaacacgaacttctgcagaggtctttcatgtttgcactttgctccatgttgaaagcagaagtcagagagcagctctggtctctagagcacacaccacagcagcttacagataccgcatgactagactctagtctccaactcatgtcacaggagtagaccatagcagagtttctgatgtagtcttgcccttaataatttaatcatatgaatatataattaacaatttaaataaatgtaaaatatgatccaagcactagaaagtgtttaaagtttagtattgaatttaggaaaggggtgttgggatgaggggaagcctcgcgatgtaagaaggtgtaggcttggaagatgtaagtaagtggaggtcagatgggaacactgggctgcctggaagagcattagctgagggcattggtgtgaaagccatgaggaggcttatgctctgttatgcttatgctcgggagtttagggtatgtctcaggtctaggatttgaagaattataaaagtcagtttaggaaagttggggagaggaactgtcctgaggaggtggatggtgggctcagggggcacctctgttatggaagctgattagcttttaaagtctgggtgctatctggtctgtaggtgccagggaagggaaagcctgggttatatatagcagtacgatgtcgatctgtctgagcacagtgaaaagaggaagaatggggagacaggagcaataggagtgggaccgtgaggaccacatagatctgtgagggaggagacccagggccagagcatagtgctcaaaggattcgtggaacttaagtcaggaaaaagacctgtttgctaagcgaagagaatgaggccgactttgagaacttcatggtatgcctttattcctgtggttactgtgttgtcttaatccctctgtgccacatcctggggaacaaaactaggaccctgcatgtgctatgtgtgtcgtctccttctgagtcatacaccagcgctgagacagctactgtgtttaaaactcttacgtgtattacgtgcatatgagttgtctaatgtaaacaggataggagttctcggggacgtcagaactgtcagctgaatgtttgccaaaggtcacattgccagtcactcatgggtgtgttccttcagtgacgctcctgaggaaccccacctcctaagcagtctttctatttatttcttagttatggctgtgttgtcagagttagactaaagcattatccagattatgacatgcttggcaggctgaggcaggagcagcaagaggcctgcctgggtctcacacattgtacataagtcatttcagaccttgggggactcctagaattagcctaaaagccatcagggaatttgcttgactaagtttaggaaacatgtcttaacatgcctgttcttgatctccatctgcaatactaccttctctggtagactgtctgctcttttgggaggaggggtagggtgttatatagtcccaaatggcctggaactcacttttgaagaccaggccagccttagactcacatatctccagctgcctcttgatttaaaggtgcgccctcctcatgtaatttgtctgttttatatggagtatgactcaccccagcctccaggcgttgtttttttgttttttgtttttttttctgtcttatagccatccatttggttttgtatggctgagtttctgaagtatatggcaagccaaaggaaaagaatcagtagaaaatgatggatagacagacagaacaaaatatcaaaatgtctagcagaaattgactgggaaggcttctgtaacccagtcagttggagtttagtcagggtaaaatggtccctcaagtaaggggaggcttcggagtatcaagagtgggcattgtcaaattgggtagagcagaaacagacctgggatggtgaggtggttctaacttttcagcttttccttccctctgcacacacttgtttgttatggggaaacagtagtaacatctgttagaaatagtttttccttggagctgttcccatggctttccttaggctgtttttttctcgtgcctatcacagtgtttagaaggctattctgtcttcagattggagagaacaaacattcttgggcctgaaatggtgggggggggtgggaaaaaccccatttccagaggcagtttctcagtggattcaaacagcacacagtattttaccaatagaacacacatcatacttcctaaagtgtagcgcacaccaagacctgtgcaaacactgtactcttacactgtgttttgattaagagcaggcacagaagttaacctggaaatgctcacaggggacctggaaaacatgaatagtgtggtttatagtccaagtcatttgggaaaccagcagcaagttttgttgttgctttgtttggtttctactttggtggtgtctggggactgggaggctaatacatgtgagcaagtgtgtctgtgtgaatgtggaggtcagaggtcactgtcgcatgcctttctcagtacctttcaccttatctcctgaacctggggcttactgactggctgcactggctggtcattgggctccaccttcctaatgttgggacttgccggtctccatcttcgtaatgctgggattacaggcacctgtcattgtgcccaacgttttatgtgagtgctagagatccaaattaggtcttcacacttgctgagagaatattgttgtcaccatcaccatcttcagagatgatccaatggatttcagtaggtgggcagaggagagatgtcccagcagtccaagtgaggccaacattggaactgaactgttaagtcagtagccatggcaaagactgagagaaaagagggcttgcatacaaacaggactgcaggattctatgcacatcagtaccacattaaaaaaaacctctctggactgaggggtggcttgagggaccaaaatgcatcactgttgcattaaggaatgggaacaggaacttcctcttggagtagtttgaccaagaacctcaagtttgagttctgcttctccattgtggctagtggcctcttggcagcatgtctgtcctataggactgatctgtctgtccctgttccttctctgttgtgtctgatctctctgtttgttgtgttatccctaacaaaagttactttactgactcagaacaccattcggtcatagagctatgtgcacacgttgctcccaacatttatgtgttgtttgttttaaggttgctttcaacctgtttgctgctctcagcaatgattgctacagtacacatgcattattcttctcggtcgaccatggaagagtccataatctaagagtaaggctgtgcattgagcctaagttgtaaagctgattgcatgggaaatccaacacatagtagagttggttacattgttctcttaaaggcaggttggttaaacaggctgagtatacatagactagcagggtggatgcatagtcctacacgatctctgcacaatgtaaatgtggctgcagggtctggcagtagtttagtctctttgaagacaagaagtgctcttagaaaaatagattaccatagtttggagtttgtagaaataaacataatgtaattttctaggtagctttattagacataatgaaaacaatcattttgtatatttgattgtacctgcctatgttcatgtgtttagggaggggtgtgtgtgtgtgtgtgtgtgtgtgtttatatttatatatatatgtgcacttgcttgcttgcttgtgctgatgtggaagccagagatcaaccttgggtgttgtttctcaggcttattccaccctgttttgtttgtttttttagatagggtctttcactgagacttggcatttgtggattagactggcatggctggcggtgagccccagggatccttctgcctactcttcccagagctaggattataagcactctccatcatcctcagccttttaaatgggttccgggggtcaaactcatgcgtgtgtgacaagcatttatgggttagcctatcttcccagccttactttatcatttatcttcttccattggttgttttgtgtatgtgtgtgggtacatatgtgatagtacacattacatatatatgtgtgatagtatatagggagaggtcagagcacagcttgccggagttgtttctctcctttgtcgtgtgggtcctgggtaaagtgaggccatcagggttggccgcctttacttgctaagtcatctcgcctacacacattcatcattttaagaacattatttttcaaaaaggcttccttatttttattttgagtgagtgttttgcctgtatgtaggtatgtgcaccatgtgcatgcctgtgcctgaaaaaggtgttagattgtctgggactggagttacagatgcttgtgaactgctgtgtggggactggggactgaacttatttgtatcctgtgcaagagcagcaagtcctctagaccactgagccatctctccagccccaaattcatcattctaaatgtaacattctgttataatttttttctgagacaggatcttgctgtgttgcccaggttactttatcttgaactccgagtgtcagtgactctgttgtctcagcttcctgataagattctgggtttgatagacctctgtaacagccataatcttatcttcaacagaggcatgacacacaacagatcctcattcgggaaacttccttatgccctcttgtcatcctctctccagatccagctttcagtgcctactgacccgctgcttctgtccccataattttcctttgaggtcgtctttaatgtagagagaggaatgaaaagtgactcaaagtagagcccatgcctgtctgtacgccttggtgggtgggtgaggtgagtgcagatgggggagggtccagttccaaaaaggaatatgaattacttaaaacagtattattaatttttcacatcgacaatggagactgatgaaaagtgattccctgttttatattgatctttcctaagtaattatatacacacatttctatttcagtgaatttgggaggtttgaaagatcacattaaggagatccagcggtgtcggcggttgattcttattgcttgtggcacaagttaccacgctggtgtggcagtaagtggccccttcacatttcagttctgttgggttgaaatcaggatatctgcatgtcagtcctattctagtaacctctaaaagctgaaatctgtgaaagggacttacgttggttgtcagtaaagaaactgggacatgttggcctcttaataaattgcattagctgtagttactttataaggaggcaggttaaaccctggcctgtgtaggtctcttactttaagatcaatttccaaagttgatgataataattttttatttgctgcaacacaaaatatttattttttaccccgagagctttttttccctaagggtttctctgtgtaaccctggctgtcctgggtgacctggaattcactttgtagaccaggatggcctgggaatcacatccccttgcctctgtaggcgagggccaccacaccaatcatttattgaatgtgtgaaatatctggttaccagcttcacatgtcagcaagctgtgcttttccagagatcctctccccaaacacttcttggtctgagaaggcggcatttcataagcgtgaagagagagtaagttaaagacgctagtgagagcttaaggaaggtgtggatgaggtcaactctgtaacgtccatttgtgaccaggtttcctactcagaagaaagcatttgattcctgctgcattcagctctgatcctcaatttgagtataaaatcttgctatgttagaattctctgaatcatttgtcttctctaagggagagatttcataagggatctatgtgccaaaattaatgaaagcacgtaagaaatctcttgtgagtagcctatgaaatagtgctgtttattctactcatcctagactgaatgtttactttcatgatatagtcaagagcgagtgacaggcacatgtcttctttcagtgtgtctgtacccgattagtaacaactgcctacgctcaagttggtctgaaaccagcacgctttccagagtttaactgcctcgtgggctttcgggtcatagaatggcatttgcagcataaatagttatctttttaggttaggatgaaaatatttaactatttgtaaagtatttctcatcaacacattagtatgagatacttttgggttacattatttttaaatatctggtaggttgttaggtttgtttgtttgaagataaatgccaatataatgcatttgtaatctagggggaaatttttttattttcatttatttgaaggaagacatctagcttgctagtgtcagtaactgacttagaaatagttacaaataaattagaccaacagaaaagtaattaaaaattggaacatttaattttcaaatacttggcatttatgttgctgtcatattgcttaaaaactactaaactagaatcattgtgggaccaaacacagaagaacaattctgtttgtgggcaagcaaaagtgtaagagctgtggaatacagacaactttgcagcggtttttggtttaaatttccccctttctctctctctctttcttccctcccactcttaactctcttttgctgtgtgtgtgtgtgtgtgtgtgtgtgtgtgtgtgtgtgtgtgtgtgtgttccccctttctctctctctctttcttccctcccactcttaactctcttttgctgtgtgtgtgtgtgtgtgtgtgtgtgtgtgagcgtgtagggttccttggagctggagaatgcatggttgtgagccctcagtcacaggtgttgggagacaaactcagtcctctgcagctgctctcttgctccagcctttgtggttttgttgctgtagaggaggaatgtgctataaaggagggggctagtgacaggcagggcagggctggctggcctgaggaacaggtgaaaggctgctgctgacaggaagaaaatgtctgttatcagcactaaagttccaccatgtgcctgtacatctgtagggctgaaaaaagactggtgcctgaaggtttgctttctgttgtttgtaattttctgacctttagaataaaaggaacttagtgagaatgcgacttagtaaaaggcttgggaattccctttgaacacaagcgtgttgcttcctctttcacaccatgctccattgctccaaagttgacaacaaggagctgccctaaacagaacttcttaaatgtattcacatttttgaaatagtattatttatacatatagtacatttttaaatttcactgagtatgtacattattacaatttaactttaattttatatgtttagaattagagaattagtgatacacaagttgactcagaacagtgctttttctgctcaaatgtttcatatttgtggatatatttgcttataagcatgttttcatagagcttagaattatggctgacacctgcaatcccagcactcaggaggctgggacaggcacttactgcagatctgaggtcagctggctctgtactgagttccagatcagtctagtgttaaacaaaatagagcatccacattggtagtttttctcaaagagttgcactgaaagttagcagtgcgtatctcttagtagtagggtggtgaatgcattaatttttttctttaatttgtgtttcttagtggtttccaaatgtatgccttgtttttctgtggcagtgctgtggtggggcctagggccttaagtgagctaggccagtgctcaccacggagctaccctctcgtctgtgtgctcactttgtaattagaaaagtggagaccaaagaagttcagtgaaaaaggatgtcctaaggcagagtgtgttcttttccctgtagacccgtcaggtcctggaggagctgaccgagctgcccgtgatggtggagcttgccagtgacttcttggatagaaacactccagtctttcgagatgatgtttgctttttcattagtcaatcaggtgtgttcattttaaacttgaaggggaaaaagttattttaagtcaagtttcctaataagccaaccctatcttttaaactgacacttagcagggtgtggtggctcacacctttaatcccaggcaggcagatttctgagtttgaggccagcctggtctacagagtgagttccaggacagccaggactacacagagaaaccctgtcttgaaaaaaacaaaacaaaaaaaaaaccaaaaaacccaaaaaaccctgacacttaaactggcatttcagatggcctggtaaataccgattgtcttcgcttgtactaatacattctttaagacttagtaaaaatgaacatctttttttacatatagcttatagagtttaattttcagataagaaacaaaaactgatcctagaaatcctaggttttgttgttgtttgagacagggtatcactatgtagccttggctggcctgaacttagctaggtagaccaggctggcttccaactcagtgatatgcctgcctcttcaacccaagccctaggatttaaggtgtgtgccccatgcctggctatgtcttataagtttaataagagcatgccttatgctttatttaaaacaagtgatagtattaaaagcatggcagtcggttggtttttcgtgtatgaaactgcatcctctgaaactgctctctgttactgttgtccattttacacaggcgagacagctgacaccctgatgggacttcgttactgtaaggagagaggagccttaactgtggggatcacaaatacagtcggcagttctatatcaagggagacagattgcggggttcatattaatgctggtcctgagattggcgtggccagtacaaaggtaaatttttggtttcttccatggaagttacttaaccatactgttggtaagagactctgatctgtggggcagttactgtactctcttctcttagggaggagagcaggaggaatccctggggcttgttagtcatcaacttagctccaggttcagtgagtgactgtgtcttagggaacacgacagagattgatagagcaggacacccgatggcctgctctcctgtgcatctgcacggatacatgtatgtgcactcacagttaatgtgtgcatacatgtgtgtgcactcacagctcatgtgtggatacatgcatgcttactcacaatgcccgtctctcccttccccacacagtcaaataaataaaacttatttatgtatatgaatacaccttcactgtcctcagacacagcagaagagggcataagatcacattacagatggttgtgagccaccatgtggttgctgggaattgacctcaggacctctgtaagagtaaccagtgctgagccatctctccaggccagcattaaaacttatacatctgtttctgtttagatagtgcatctgtagaagcttaaaaatacttttgttttaaaggtgtataagtctgctttgctctttgaagttgagatatgaataaatgtaagaaatatccaactctttgcaagctgtattgatataaaagattactctccacaaatatgttgctttttataattttgaaagtttagttttttttctgcttaagcttaacattttttgttgattctctaataagatatttgtcagtggtttaggctttaatctataaagtcttatggaaaactttttgtaggaaaatatataattcttgttaaaaatttttgagttttttgttttgagagccttggtattactatactttccacatagctgaaatgtagattttcttcacatcataagatgtgacttcatccttggtgaatgcatagctagctctttgcagctgtgttgagacagccctggtgcagtgtgggaacacaggctcctcatccagagcatgttgtgaaccactgcacttccacatggtgtggccgtacaggacgaggagttgcaagggagtaagtctttcacttacgagagctctaatttccttccctcgttttactatgaaggttcgcatgcatggagtggttacagtgaccttaacacccacccttagtcttttctacagctttgcactgtcatgtgtgacttactcggttgtgcagctgtgggcacacacagttctaggagactgggctcacctctgtgctcactcaaacctccacccgcatgctcataactactactttttcttactaaagtactgtcgttttccagatagttctcatgaatgggagttttatgatacttgtgctttgtaactggcgttcatcgagtgtgacacctttgaagctgttcatgttgttattagtttcagcaggtctttctttgaaagcaaatccttttactttttcttttttaaattgaaacaaagatctataggaagttgcaaagctgcattagtcagcttcacattataataacaaaatacttgagacagctaattctgagggagtgaggtttctgtgagttcatagctcgggagggtcaggtcgaagttagatagcctcatggttttttgctccggctagactctcattccatggtgaggagaatgaagagagcagagatgatctgagagtcagaggtcccacaagatccttcccagacagtttccaaggtgaccaaaggacccctcattagaccagctcctactaaaaggaggaggtcctacgaccttccaggggtgtctctaacatggactggtacctgctcctagccccagtgcagtgaagtctcttgtatgcatcacttagcttcccagtgcttccgtcttataaggaagcaagcaagcatcttcttagtgatttctttttaaagtgactcagttttagtgagtattggcaagggtctcagcaggaaaagatacctactaccacatcatcaagcctgatagtcttgagtttgctccccagaacccgtgtaggggaaggggagaaccaactgcctataagttgtcttctgacctccacacatgtagggactattgtaccccaaataccctctaaataaataaatgtaaaaaattttaaagaagtatggcaatataatacagcttcatttttcttagatttcaaattagttttattttcagctgtcttagatattcttggcatagggttttgtaaataagctttacattcagattatttctgaatggtgaatgtgagtttctatgttctaagtaatcacagaagttgctcagtgctcccatcaccggctcagtaatgagcctgcatacaagtctccccctctgccggcagcagtggttggcttacggctggcactggctttcatagcatcagaccatggataatttggtgtttccttaggaaatgtgcagaatttgcagtttttgttattgcagatgtttaagtttttaccacactgctgacttagttagtgttttttttttttcttccctcccccgccccctatgtgtttcaagtaattttgtctttggctgaataaaaagaaaatcaagttgaaaagttcagttaacattttctgggtaaattttttcagatctcagactgtaagtgtgaggtgtagcttgtgtttatcataatgagtttctcgttatgtactgacgacatggaatatggcggctggatacacactcagtggtagtgtgggggagctaggctgagcgcttgttatcaggtcagattggatttggaacagcttttatctaaggagaccaagatactggcctgctttgccctgtttactgaagggtgcaccttagaacacagggtccttaagcatggaggcaagggggtgctgtgggcatacagtggggactggtggctgtgaaagccaggggtccagcagaactgtcagggtcccaggtaatgggtgggctgagaaggagcctcctcagcatggcaggagcgtagacactgaggagtggttcagggaagattgctgattgagtgtgaaaccacactgcactctggagaacaaccatgtgcacagcacagtatgcctaacaaacagtttaaacacgaaaatgaagtaaaacctttcatggcaaagcagtagcatctgcccttcaccttcagctgacgaggaagcggcttacagggtctgtaagccggaaggttcacattgtattcatcgtaggagaaacatcttccagtgcaagtttctgccagtgctcttgagcacagtgttctggctgtgtatcagaaactgtactgggtgttttctgtgtctgagctaattatcaagattgtcttgggttcttgaacacttaacatatagggcatctgatgctgtaggcaggaaaccggctcaagttctttgacaccactaaacaaaggaaggtgcttagatgttatgtgtaaaagagcattataaaattctgacacctaacgcttatttttaactggatggtttttgggacaggatcttatgtatctcaggctacccttgaacttgtagttaaggagagtttagcttcctcatcctcctggccctgcttcctaagtcttgggattgtcggtctgtaccgtcatgtgtgcagacgtactcagctaagtaattaactttctctttttttcttttattgaaaatagattttttttcatatttaatataaagaaaggaaaactgggaccagcaaggtagctaagtgggtaaaggaattcgctgccaagcttgacaacccaaagtttgatcctttggacccccatagtagaaggagagagctgattccagaggctgcaccctgtcctctatatatgctctctggcatgtacacacccaccattgacacacacacatgtaaatcataaattacaaatacgtcatcgtaggtttgcagtttctttttgttttgttttgttttttgtttttgttttgttttgttttttttttggattcagggtttctctgtatagccctggctgtcctggaactcactctgtagaccaggctggcctcgaactcagaaattcgcctgcctatgcctctgcctccaagtgctgggatcaaaggcgtgtgccaccacacctggcagtttcttaatttttatcgacttacatacatttagacttttattgactttttgttagtgtttttgttaaaatgtaagagtgaggacctgtgctcatgggggtagctgtcaggacagtgcttcttggctctcactcagcgtgaggatctgaggggagttcccagccccagcacaagcacctcagcactggggaaatagaaataggtgggtcctgcatgttcctaaagagaacagtagtgagccctgggtcccagtgagagacggtgtctcaacaacaacagaaaaccagtgggttgctcccgatgaacacctaaggttgacctccagcgtccacatgcacataggtgaatcttacccctaggtgccctcttcccagaaactcaaacacagtgagaatgagccaagtgtggtagctcacacctctactttctgtgtttacaaggctgaggcgggaagattattctgaatctagcccaggtgaccctaccttaaaaagaaaacagtgaaaaagaggaccagccagtaggcaaaggttaaagagtatgtgtgggagcggccacagtttctagcctgctctccccttcactgtggggcgggcacagattaacagaaacttccttcaggctttctttctcctttcttaggactgtgaggggtctcacttgtgttttgtgtgggcccaagacatagacttaagtgctttgtgattaaaaatagagatagattcccaagtactaagtcaggtcaatatctccagagttatgtgtaaaagatgaatagtgaggggctggagagatggctcagttgttaagagcactagctgctttataaaggacccaggttcaaatcccatcattcacatgacagttcacaattgtctatgattccagttctagggaatctgacaccctcacacagacagacatggaggcagaacaccaatgtaattaaaatgttaagaaaagatgagcagtgtatattgtgaaagaattaggatttaattctcatcttttgttaaaagttttcaagttcttaaaattcacttttctgttttctgtggtgttgtaggcatacaccagccagtttgtgtccctcgtgatgtttgctctcatgatgtgtgatgacaggatctccatgcaagagagacgcaaagagatcatgctcggactgaagcgactgccgggtatgcatagaaaacaataggggtctctgtctgcctgtccgttggtcagtcggtctgtctctgtatctctcccctgtaccccctttcttttttttctttttttttttttttttgtgagacagggtctcacatgacctaggctgccctcagacttaactagataactagataactgaggatgacattgagctggacttcctgcttctcccttgtgagtgctgagatcacaagcgtggtgtcatcatgcccagtgtatgccaaggctttgcacacgtaatcgagcattctcccacctgagccacattcccagcctgagcgctttaagactgtaaacacttaccaattgcagttggcaaagactctgttttttagactgtttcttcaccctgctaattgcttttttttgctgtgcagaagtttttttaattagtaaaaatcacaccctgtgtaaacttcatgggctgccatgctccaccgtgcaaagctgcagaaagttaattttatgaaggcctgcttgtcagctcttgtggtcatttcctgtactagtgggagtccttctgaagaagtctttgcctttggcaacgtattgaagtattttcacaatatgatttactccagtactttcggagtttcatatccaagacagtctttagtatatttcacattggtgagaaataatggatctaattatatttgtcaatcttcagttttcctagtgtgcttcttgaaaaggtaatttttcttcaaaggtgatttttcattagtgtattttcttgacattttttgttagaaatggtggctgcaaccatgtggtctattcctgggtcctctgttctgtggttctccatgttgggctctgtcagagccatgtgttggtgactaccactgcgtcgtgcagtcagagatggagagttgtgacaaatgcgtctgcattactcttccggcttcagatggcttggagagctggagtcttttgtgcttttcctgttttgctagagcagtggttctcaaccttcctaacactgcgaccctttaatatacagttccttgaatgatggtgactacaacattatttttgtcgctacatcataattgtaattttgctactgttaagaatcgtaatgtaagtatctgtgtttttcagggtcctaggtgacccctgtaaaagggtcatttggcacactcacaggttgagaaccactgtgtgagtgcgtctggattccatagcagtgaacagagctgtctaaggcccatcgactctagagttatttacagctgtgagcttgcctcccgggtacctagagcagtctgcctttcctgcctttcccatacacttcactgccgggctgcctgtatgttttgaaggtcagagactcacctccaccccaccctcagcgcgttgactatgattgttctctgtactcaggcccagagttgtgcagtttttacatttaattactttattttatgggtagaggtgttttgcctgcatgtctatctgtgtatcatgcgcatgcaagaacctgtagaggtgagaagagaacattagattccctggaactggagtcatagatagtcaagagctgccatgtgggtgctgggaattgaacctgggtcccctgaaaggtcatccagtgctcttagctgataggctatttctgcagccctggttagttcagttataagaagtaggtttctttctaagatggtgtctggccactgccccctgagacatagagaatgacagattggaaccccattgctgctggaggaatcactgtctgcagaccagtgcctggttgaggctttgagggctgtagtttgtcctgtaggtagggctttcttatcccctcctcagggtgaaacttgtgcttcccttctcccagtcatggggctggagctgtgttctgtttggttacttttttgcctggtggctcttctgattctttgtgttttgaagagtgattcatattctcattctctctctctctctccctctctcttcttctctcccctctccccctctctctttctctctttgtttttgttttgtgtttggttttgttgttgatttttgagactgtctgtgttgtagcccagggtgagttttaactgggtatgtagggaggaggactttgaactcttgatcctcctgcctctaccttctgagtacttggatcacaggtgttctccactctgcccaattttatgcagttatgaggaccgagcccaaggttacttgcgcatactagttgagcactctaccagtggagatacattgctggctccttgaggctccctccctccctccctctttccctccatgttttccttcttcccttccttcctttctttttaaatccgactcctccctgactgtgttacagaaggtgtcttctggcccaccatcccctgaaaagtccaaatgaaggcttttgatcttagtttctatatgcttgatttgtaagagagtgggcagtggttgaagttctcatcttgaagctgtactttgtagctgcagagttaataagatctttctgattttgcttccatgtgttaagggaatttcatactgatatcacagaagaaaagaaaactggccgttttgttgtttgcttatctgtgaggtgcactgctcatttttcaagactgctctgatctctgccctaacagacttgattaaggaagtgctgagcatggatgatgaaatccagaagctggcgacggagctttaccaccagaagtcggtcctgataatggggcggggctaccattatgctacatgccttgaaggggctctggtacgttgtttcacttacagttgatttcactctagtgacttagggagggacaaggaacatttactgttatgtatcccataatgctagggatttaacacagagagccaggtaatcactatgtcactgagccttgccattcaagtgagtgagtgtgtggtgtgtgtatgtgtttgtgtgcgcgcaggcgcaggagcaggaggtggtatacacagcgcatgtgtggaaatcagtgaacaacttaaacaggagtcagttttctccttccactgtttgaatcctgagcattgaacttggatagtcaggcttggtggtgtgcgttggttgtgtgcatcttacctgtggaagcatcctactaactccccacgtgtttgtagactgcgtaaattgaattgtgtgtgtttgctgtggtttatttacctgagaacgagccataggactcaactcaaaagtgaaggcccagaagaatgtctccatgataatttgggcttagcaattcaagatacgcgcaacagaccaaggttcattagataagaaattgaaatgaaaataaggcaagtagatgaatgtttgcagagcagcgggctctgcgtttggtaggctgaagccttaagaatcttcttacagattcaacccagaccagtaggcctctactacatcttgggagacctaaccatctcagatgctttgtgcagtgttttcttttttcttttttcttttttttttttctgagacagggtttctctgtgtagtcctggctgtcctggaactctgtagaccaggctgacctcgaactcagaaatccacctgcctctgcctcccgagtgctgggattaaaggcgtgcaccaccacgcccggctcaatgttttcttaaaagtggaattctgaaaagtgagctaaagacttctctgttttttcatactagaaaatcaaggagattacttatatgcattcggaaggcatccttgctggtgagctcaagcacggccctctggccttggtggacaagttgatgcctgtcatcatgatcatcatgcgagaccacacttatgccaagtgccagaacgctcttcagcaggtggttgcacggcaggtaggccaagtgctgtgagtgccctggagatctcggtgtggtgactaaggcgcaggtggattttgtacttgcatgatagagcaggcgcagtacattacaaacacgctcacttgtcaactcctttgctttgctctctatgtataatttgatgatacccagtcatcatttctctcataatagaagaactaaaccaaaacgaggccatcatctccaaattccttcttccgacagttaacataatgctctttctttttaccttaacactgttaagaacttaacttttttttttttttaaagatttatttattattatatgtaagtacactgtagctgtcttcagacacttcagaaaagggagtcaggtcttgttacagatggttgtgagccaccatgtggttgctgggatttgaactctggaccttcggaagagcagtcgggtgctcttacccactgagccatctcaccagcccccaagaacttaacttaaaaaaaaaacaaaaaaacccaatgtttggtttacactaatatcatggatgctgtggctgacaccctccccccatcagctggtttatattttaattccagaagatatttctccctaagcacagtgtactagaaataaacttgaacttcaaaggaagcagacctgtattcaagtattaaacttggcatttctttcttgtggaaattttttaagaaatctaccgagtccacaaaatcggtctgtgcttctgtctaaatgagcagtcagaccacatgtgtgtgtcaggcagtggagcccatgcccacctcttgttgctcagcatctgcttcctggtgactgtgttgtgtatcgttttcttcccaggggcgtccagtcgtgatctgtgataaggaggatactgaaaccattaagaatacaaaaaggacaatcaaggtgccccactcagtggactgcttgcagggcattctcagtgtgattcccctgcagctgctggctttccacctggctgtgctgagaggctacgatgtgagtgaccgcctccatccatccatctatctatcatctgtctgtctgtcgtgtgtttgtgtgtgtgtgtgtgtgtgtgtgtgtgtgtgtgtgtgtgtgtgtgtgtcacagttcatgggtaggagtcaggggacaacttgcaggaattgcagatatccttccactgacctaagcgttgaactcaggtttggtagcaagcgcctttgcctgctgggctgtctcactagcccctcccagcttgaaaaatctgtcctgtcccattcatgctatctcctgttaccttttcaccgccagttcgtagcttacatcagttttttcttacccatagaaacattcacttcgttgaccgggagcagggctgttttcttcatgggtggtgattggcatttttgggtgggacaagttattgtttggacccctcccacagtgagggctgcggcattcttaatcctctgggtgtcatgggaaccaagatacccggtagtttttccagggttccctatgagggccatcttcctaggggaccaaggtagctctcctatgtatgtcagcgcctttcctttattgtttttcagttattttctaggctaaattacatgattatatttgctaatacaattctcttttctgcaggttgattttccacggaatcttgccaaatctgtaacagtagagtaacagacacctgaaacttaagacagttaagcaacacgagataccttttgtatttaaatttttgatttaaactattgcctcctgaaagcctttttttagtaaatcttatttatatatcagttataattattccactcaactaatgatttttgtgcaattgtctcattttcaataatacatgggggaatttgattcatagaatttaagtctaaacctaaaatcagagagatctcagctgtattttgttcagagaactggataatggatttctgggccctccatttcatagaggaggcttggtgagtgtcaaggcgcttggtgtttgcttcagcataacgtgattcggtcagtcagactgagggaagaccagtgcattgaattggatactccaagtcagtgtgtgccagtgcctggacagccaccaaaggctttgctgcgctacttataaatagaagatgctgcagtttatgttgaagcttatttctgttttgtttttaaatcaaactgtacaccaaaaaacttggtgagatttttatcttagtttagttaaattagttcgaacatgtctgtcatctctgtagacagtgcgtttgggtcctccacacctgcagagaagaccttgtggagtttggaaaacttgtgctgttagacattgatatgtggctggacatttgaagataggacacagggatccactccttatttcttcatctcttaagagtagttggcattttctcgcaactgtagagcttcactgaaaagcaagtactgtttgttgagtgacgtactttgtagctgcctttggcatcgtagcaccgagttgctgtcaagcctcaaattggtgtcagggtgctcaattctctcttcagctttgtcccaagaagagtttcctgcagttacctttacttcctcccctgccttgttgcagaaagcatcccttggtgccagtgtagaagttctgcttggggggtggcaggccttgctgctcatttgaccctcagtgtatgtggcaggctcagctgagaacggcacatacttggcactgtggagtgacgtcagtttcagggttgttttctcgatgttttccttgggactgttttgactcctgttgaggagtgaatgcagtataaatacgtgagactgtcatgccttcagctaattgtgtcagaaatgcaggtcagcaagttggataaaatatttaaaatagaacattagtttgacaccccaaaaatgtgcagagtaatttcttcacagagctatttgggtcagattgtgtgggcagtgggcaggtgtgtgtgttcaagttaggtccattgttttcaaaagctttcacctgtacacggtgaaagcgcagtgcttcacggagtcatgctttgtgtttgaacttagtggtaagcagttaacacttgtgaaggtgagttgaagaaaaagttgatgtcactttagacatttcagaaggcttcactcacactgatggaggctggaaacctgattttgataacccaagacagggccacagtttgtactccatgtcactgctttgggtacgtttctctgttgtatttgtccctaagacttcatgttagtggagcatgtgtgtaaggtcatttcttaggcctgatgtggtagcacagctgctcgtgtttgggtgtggcttttgtttggtgtgtggctctggagcacagggtgatgttggtgtgttgagacactgaaactgggagacgatcagctcagtgctgtctggtcactcactgtcagctcagtcactaccccggggtcctgttggagcagttttggattatacagctcagtcttgctaaccaccctccgtgcagcggaacgtcacaactctttttgtcttctgtctatgatattgaacccatttaccagtttctcatccatacacactccaagctagaataaatactaaaccagtcagaaacccagatgaggaccagggtagtactgtctaaacaaatattattgttttccatatcccattttgctttctacctaaattcttttattagttcttaatacccagatattttagcaaggcaaggcactaggtgagtaggtcccactaatttggtataatacaggacatagaaatctaatttttcaaaacaaaaataccctgtaaaagggaggctttctattaaaattcccccccccccaacccccagctccctgtttttcaagacagggtttctctgtgcagtcctggctgaactggaactcactctatagattaggctggcctcgaactcacagagatctccctacctctgcctccggagtgctgtcattaaattctaatctatctatctatctttctttctttctaaaaagtaattattttatttgtttacatttcaaatgtcctccttcctggtttcccctccatgaacctcccaccccatccccctcctttttgcctctaagagggtgctccccaccccctcctcaccccctagcatctcccttctctggggcatcaggccgccacaggaccgagcacatttatagtgtgtttaagttcacacacacatctttacctgggagtccttgctaggcagggaggactgaggcacctgacacatggcccacttgatggttactactttctaaaaaagagaatctatgccgtaagatagaaaggttagaaggtgagccactcactcttagcctgtgactggctcggcggctgtgtatgagcggctgccatgctgggcagcagagctagaccctcagagcagttgtgactgtccctggtggacctggtccttgtgaggctcaggagggagggtggaaaggtggagctgtgctgaggtattaaatgctgggcctgggtttgtttgacatgttcataagcagctgccccggcctgtccgtggaacaggggactataaagaacagcagttagtaatatgacaagcagttgtgtgtccctgctcagcagagtgatgtcacagggtactgtgcagaaggctgttagttcagaacaccaacatcagctttttaatagcaggttgtttctgaagtgacaggtggtaaccctttcagtccaggcctcttgcctcagtggttctgaaggtgggaggaaaggaggctggacttggtcccatgtagagggaaactaacactttcacaacacaccttcagtctttggggttactcttttatctttttttataattaggatattctagagcaataaaagagactaaggttacctgtttattatatacattaactggtatgagttttctaaaaaaaataataaagcacaatgtcattggaaaatgtttgtttaaaaaaagaattcataatttacaacttgggaaggccaaagacatggaagggaagggtaaagacattttgatttatgacatccacattttgatttatgacaacccatagtgggttgtgtgtacagtaatactacgcagggttttaagcttggagacatttcacatggcttttatttagtttcacattcaaaagttttaacataaattggactttttcactgtacttaaagattgttaataagtatttcagtatcttcatagctagaatttatttaaacatatcctcagatctgggatgataacagataataaaactgacagcattggctttgaatagtaatgtccatagttttaagcaagactgctaagttgtgttgtgttgactgtaagtccgtacgctcagtagtgatgttctgaaggctgatgatggcatcagaggaaacgtcaccttatcttgtttctgcactagtttccagagagtgtagaaatggtcttgctaatttttgaatgttctttggttgaatgtgtttttccattaataacatttttatatttgtttaaattatacttctgtgggactgggggttagaataatcattgctctgttttgattttgtattcttttaaatgaatgtttagttttctgagccagatggttatttcatccttgtgtcctgttcaatccagtgactacaccggaactgtgaataaattacccaaaaccttgctgtgtgactttttctttttttggttgggcttgggacagcaccccgggccttacacattaggtcacaatcgtagcagttcattttgaaggatttactagcgtttgaaacacacatgtgcatgtagcattttaaagttggtgctggctaaagaatagagtcagtgttttgctttcattgttggtaaacattgccggcttctcagccctgttgctttaaagaatgaatggctgtgcgcatatccagagccagtaccccagcttcctagcagttttacgaagaatcattagataaaactctgatgttatgtgtgctacactaagctccgatgtcacttgttctgcactttctcatagcactttacattttaaaaatgatttgttattaggtttctggaagggtgaccagaaagctgagagtgcattgatagctaggagaaaggggagtgtgagcggggtgagggtgcggtcaagctggcctggcacgtggcctgtcgtagataggatgtcctttagagctagaagcagcagctccacctgatgtgtccatgctggctggcaggaggctgcagtttggctgctctcgcctcagcttttcctcctgtgctctgtgctataaggatcatgcagcccccccaccccaccccaccaccatggttttgatataaagcaatttaaatttgcctcagttgcctgttggttttgctgagtgtttacaagagccagaaagtcctaaaagccacagaatctgctttccctggggtggcaccaaaagcagggtggttcagctgctgcccattgacagggcacagcagaagctgaagggaaactggtctttgttgctaacatgtccgctgaagtgtgagtcgcctcagatccttcttcgggaaagtgagcgtgtaaggtgtgaggttgtcattctctcgggtgactgtgagcacaagttagtcccaagacctgggacctgtgtcaacccttgactcggatgctaagggccacctggcagttctgtcagagtacttagaaccatattccttatccaagagattttttttttaagatttatttgtttaatgtctatgagttcactgtcgctgtctttagacacaccagaagagggcatcagatctcattacagatggttgtgagccaccatgtggttgctgggaattgaactcaggaccttcagaagagcagccagtgctcttatctgctgagccatctctctagccctatctaggagatttttgaatatgaagtatgggtgtgtaatagaaaataatggggccacggccgaagtgaaacactcggctggtcggccttgctctcctcggtattgacacaccccccccccccccccgggcaagctttactccttaataatcggctacgtccatccattttgttgttggtatcggtcttcggcaaccatgctggaacacctgagttcgatgcccacccagatggattacaaggggcagaaactagctgaacagatgtttcaggggatcatttttttttctgcattgggtttatctacgggtacgtggctgaacagtttgggtggactgtctatctagttatggccggacttgctttctcctgtttgctgacacttcctccatggcctatctaccgccgccatcccctaaagtggttacctgttcaagacttaggcacagaagacaagaaatcaggggacagaaaaattaagaggcatgctaaaaataactgattgggactttcacgattcagcacctgcttttgtttcctgtgagatgagctgaattgctttcataaccgaaacatgagcttaagccccctatgttcttctagcacagctgtgtcgagatctaattgtcctggcttcatttttaatccaaatgtattttaagttatgactattttataccatctcttcataatcttgttatggagaacaggagatacaagtatgcaacgcttctttccggtgtgtataatgaataaacacttcataacttgtaaaaaaaaagaaagaaagaaaataatggtgtaagaaggcttataagtaaaatactaatagagccttttggatacagtaattataccattatacctctgcatgttttgagtaaaattagaagattatgctcattggagtcaagacaagtagaacatttaattttgttaattccagtgtgggctgagtgatttagaaacgtgtagcaggctggagagatgacgcagtggttaggagcctgtactgctgctcttccagaggacctgagcttggttctcagcacctacacagttacagctcacctatcactccagcttcatgggctcctacaccctcttgccttccacagacactgtactcacaggcactgcccctatatatacacaattaaaaatcaaaccaaaccttttgagaaaaagagtgtctaacacttacaaaccaaagccacaaataagttatatcatggaacccagcaacattgtgggttttatgtgtcttgtgtggttgtataccaagtgtgtgcagataactgcaaagaccagaggagggggtcctatgccctagagcagctggattttcaagtgcttttaagtagccagatgtgggtattagtaactgaggaagagcagcaactgctgagccatccctccaaccccccaagatttttaaatggtctatgttatatattatacacaataatgggtgtgtgtgtgtctgtggtgtaatatctgatgggtaggtagtccaagaaacttcttattcagaaaacttaggctggataaaaatgaaaacaaaaagaacctagaaccccaagctcaattaaataggtgacctgccaagagaggaaaggatgcagaggaacaaggtcagaagccactggctgtactggagggtacctgggattttagtggctggacaccaagtcaggaggcagatggaagctgggaaaagacaggaagtctgagcaaagtagagtatagcttcctgacaaggccatgtcacaaacaaagcttccgggagatgggtatgatagggagaaatgcaggcttcagcactagggtgaagtctcccgtcagaactcccagcccagaggggcccggcctgtgtcctgaaaagcgtccgtcagagggcttgttttatttactgtggccctcaacagtgccccaagcattaaccaaaagcaaacccaaactcttttctagactgctgtattttcaatacaagctttggaacagttcccacaagctcagaatccagaatataaaatggcaaacaatagaaacaaagttacagagcctccaaaactgagtcggaagcaacaggagtctaacgtgacagaggagtagagtggtaagggagcccagagacagcagacaggaaatccagagctgtagcaagcatgagtaaggagacagtgggaaagaagttgagctgaaagctggctctgaagatgtcacacagagcacagtgttaccttaaacgtgacactatcaggttccagaggtgtgccctagcccctaggcagggtatcactgagcagtacctgaaacatcccaacctttctacttaacattacaaaatcactgtatgctgtcgatgtccatctagatttcccaacatctgactttattttgtcttgtctcttatccttcccgtgtgggaaggtgtcctttggatgtcctggtgcaggtgcccctagaggcacgagaggcattgaatcccctggagctgagcccaggtgattctgaattgcctcatgtgggtgctgggatctggagtcagttccttcgcaaacgctgtatgtgcttggctgctgaaccttctcttcacaggcctgtggagaaacacttccatactgtgagctttgaatgtttgcacggttatcatggacgtatacgtttgcgtttttaatttttttttctggtggggtctaggcttcagacttgcaattctcctgctgtcctctcacaccttattattattattattattattattattgttgttgttgttgttgttgttgttttgagacagggtttctctgtatagccctggctgtcctggaactcattttgaagaccaggctggcctcaaactcagaaatctgcctgcttctgcctcccaagtgctgggattaaaggcgtgcaccaccgcgcccagccttttttttttttttttaactttcagccaggtttattttagttatgtgcatcttaagtcactttttttcccctttgaggccatttctaagttcatagtttttatttctttaagcctgataggtgtgctatttagggatttctggtatttggactgtctgagactgggtgatactgggtcctgttaatttttttttttttaatttcattttcctctcggccacttagttcccaatagcaacgactctgagactaattatatagtattaaatgtctaggccataagctttggctcatttcctgactagctcgcaacttatttaacccatttaaactattgtacctctaccatttggttagtctgaccaaggagagggctgtgaggagacagataaaaacgagcagatagacgaactcagggagacactggggaggtgagaaggaagaagtgggccaggactgaaggagaggtgactaaccaagtgatagacatagactagtttaaatgggttaagtaagttacaagctagtcagggagtgagccaaagcttatgctctaggcatttaataactaatcagtctcggtgttcttgttgttaggaactgaatggctgggagaaaaagtagacatatatgtgtatgtatgtatgtatgtatgtatgtatgagttcactgtagctgtcttcagacacaccagaagagggcatcagatcccattacagatggttttgaggtaccatgtggttgctgggaattgaactcaggaccttttaactgctgagccatctctgcagccctaatatatgtgtttaacagagtcctagtgcttggtttcttctgtgctctgttattcttgggaaattacttctgggaattctttgagagcatttgctttggttatacgatgcaccagagactcttgagcccaaagctgctttccagtcatggcttttggctatacattggatggcatgaatttgtgtgtcagatctacccagctctggctcctcacagactgggttgaagtcttggtcatcactggttcccagaacaatactgcctcacagaaagaactagctcttaagtggtgttatgtcccagagactacttaaaaggaaccgaagaggctccctggtagttgtaggaactacattttagacaatttccaatgatgatcagatacagagggaagaggcacactttgagaaacatcatcttttgctctcaaacttgattgagcccacgattagcttgctgcacgagcgtgcaggagccacagttccagctctcccctcaggggttgtagccagtactgttcacatacatggacagtccacttatgtctacttgaacctccaaacctctacatggagggagtctgcacaccccagcagatcctgatctcaagggactgagatccagggttcttggcttttagtgctcaaatatttacagtacattgaggaaagcattgctgccgaaatcctaatggattccaaaagcctagcttctctctccctgctctgtgggtggcaccaaagcagaatggaggtgtcctttcctgtctggggacagaacctccagaatgtcctctcctttgccaacttgattccagctcctctcaatggcagtagagatgtgtgacttggagcttgcattgacactgaaagcagataataaactggagtcttaaagcttttaaatgtcgaaaaaaggtctttcagtgcagtaatgtgtgtgacacctgagaggcaaagctcattaggaatgtgagtgggggtaggcatctgagagggcaggcctgctgctttattaagaactttaaaaacatttaaaaagagagcaaaatctatagcaagtcaaataagaaaaacagagaaacccccaagtctgaccaaatgtggtaaacaatgataacttgatttattgcagcagcagcagcatctgtgggtctgatttcatgccaggtcatttccctggtatctctgagccatctttcatgctcagccataactctcccactttatgtgcttgaaagtatccatccattgactttctgttaccaaggctcccaccctttagagggttggaccatggagcgcaatgtggcaaacactgaagtgggacgcgccataggaaaataatctgctgtcaatttactttcctcttggagccgagcagccctttcctttgctgctgggtcccagctcttctctgctccatcagatggccagagggtggctgccattcttatattctttttgttttgttttgttttatctttttttggaatttattttttatctttttgagtatttatttcattgacatttccaatgctatcccaaaagtcccccacatgctcccctacccactcccctacccacccactcccacttcttggccctggtgttcccctgtactgaggcatataaagtttgcacgaccaatgggcctatctttccaatgatggccgactaggccatcttctgattcatatgcagctagagacacaagctccgggggtggtattggttagttcatattgttgttccacctataggattgcagatcccttcagctccttgggtactttctctagctcctccattgggggcttatattctttagtgtctcagggaatcactgtgtggggataagggtctagacatgcatccaacatggctacctcatgggcagtcatgtatagtggacatagtcctaagaggagccatcatatcctggccattggatgggtgctgggttctctgcatggcaggggcatctgagtacagtttaagtttaccactgggaaaaaaaatgccagcatggcagagggcacagagtgtgatccacagagatgggaggtactttttggggctgcttcacaccatcaagggcttggcttctggagggttcaacaccaatggaaacacaggacattgatgctgataggccaggctgcctgggaagtggattcttgtcagtaccacatctactctctgccccctgccctccctccctccctccccagagtcctcaggataatgtgtaggaggctcatagcctttgtgagcaggtgggaggagaaagactgagaggggaaaggggtcactgcgggtcacatgctaatgctattccatcgaccctgagagcttgtgaggtccaaggaaactcgggctacataaaatcaaaactttttaaaaaggagaggcacactgtaattggcagacagagtgtgtctttgtgtgtgtttgtgtatgtgagaaatgactttcatttagaaaatttggcagtagtttccactgcgtccctaggacttttaaaatgatattttctgggctcggaaagcaggcaggcaaatcatggaatcttggcttcgacatttctaatgtaggcaagcagagagaaaggcggccataatttggctttgaggcttctatgggttgcagagcaaaccaggcaatgttaccatggcaacacttctactgtttataaaaacaaagtttttttttcctgacaagcatacttcatatttaataaacctcagtccacaggggcctcttcacgccattttaacttgggaagaattttattattgcagttgctttctgacaccaaaacacttgaaactggagtgttaagtactgatagctagaaggggagagtaagaggcgcttggtgggagtggggtgggcgatggccaagcaacatgcaaacacaaagcaggcctttcacagagctggagtctgctgggctgccccccaagtgagcattcacaaatagagatttctccttggattcggttcatgttctagtcaaaacctgtattccactcacccatctccctcccaggctctgcagccttcatggggcactgtttaggggtgaaccccctccccattttaagccctgactggttatctgtgaagttttaaatgccagtgtgtgagagggctccttagaacactctcctactgaatggaagcagaggagctctgagatgggttcttgtagctaaaaagggtttctttttggatcataaagctggagaaggcacaggaagatccaggggccagaggatccagctttggcatccacgcatcctgagtgccccagattctgctctggctggcactgttactacatccaactccagtctctagaaggacagttctcttatgccagttctggggatcggggcctcacaggctgggtaagtgccctgcctgtaaactacacattccacagttttagaaatttaggttctgagtggagtgcttttcggcgtccttgacctgggaacttagaaagtggccagaaacttcaacagctggagtaaactcatttgcattttgtccagaagctgggagtatcctactgccctcccaaggtctttgtcttctgggacccctaggcccttgggaagttgtgagggcccatttctaagtacaggcattgcattatccaaagaagccactcctgtggtcacagtcctttagggaagacagagccggaataccgtgacgtcactcatcgctcttctcatttatggtcagtcaacacttcatcattaactggaaagactgttgctttaagatgtcaaaatagatgacccttataaatcttacgggtaggttagtctaagtggccaatctgagaaccacacggaagcggtttgcctgaggatctgaggcgcctccagggaaggtgcttgcctataggaagcaagcactgctacccccttgtctagccactgtcactgtgtgaggaaagggcagtaatggagctgcgacaatgttgctcagacctgagctttagaaaagagagaaggggcagagaccggtagggggtggggagggagtactccaacactcctgtttgaactgtacccgaggtttcagcaaccgcagttctccaggtgtggcggacccagaaaaatgctattttctggattcttggggccctcttgtacttactgctcagggagtatggccatgaagagggcttcaggaagggacagcttggagcgtctttcacggaaagttggccagcagggggcagcaccctaccagtcctggaaaccacggagggggacagagccccctgatctcagtgggtagcatcccttgaaagagctgggacgccaagacaatccagggcaggaagacccacctggaaggaaccctggctagcatcaggggctgcagacccggctaagaacagcctgcgccccctgctcctctcctcggaccttcttcctgtagggagggacaactctgtccccacatcccaactcgcctgtagcctcctttacctgtatgagaactgtaggttcccttaagagggtcctgggctcccacagccttgctcagttaaggttcttgatgtccgtggggaccaagagctgcagggagcacatggccgcaagggggcgcccgaacctgcaagacctacattgtgacattttcttacacttatgaaaagtgttatttcatatacattgtctttatcatccttttccactgtcttccccctcctctaattatcccagcttctgttttcccctccaaaactaaatacattccagacagtttctgttcataatttaaacctactccagaatttgtctttttctgagaaaatcatcttgcatagaagcaaaggcccaccttgagttccctgcaggacactgtgaagccatatcgtccctcgatgtagaagttgtgggcagacgtgaatgccatagaggtagggggagggggcacaccttctttgcggttggtgacttccaagtcaccctccccttggaaggccccacccctggctcagagcagtcca

SEQ ID NO: 151 - DNA, 2284 bp, Mus musculus
ctgtcgcatcccagagtcctctcattgccaccaccccggcccgagctcaccctcgcttctgaagctctccgcgcgcccgacagctcagccctcgcccgtgaccaacatcatgtgcggtatatttgcttatttaaattaccatgttcctcgaacaagacgagaaatcttggagacactaatcaaaggccttcagagactggaatacagaggatatgattctgctggtgtgggacttgacggaggcaatgacaaagactgggaagccaacgcctgcaaaatccagctcattaagaagaaaggaaaagttaaggcactggatgaagaagttcacaaacaacaagatatggacttggatatagaatttgatgtgcatcttggaatagctcatacccgttgggcgacacatggagaacccaatcctgtcaatagtcacccccagcgctctgataaaaataatgaattcattgttattcataatggaatcatcaccaactacaaagacttgaaaaagtttctggaaagcaaaggctatgactttgaatctgaaacagacacagaaaccattgccaagctcgtcaagtacatgtatgacaactgggagagccaggacgtcagttttaccaccttggtggagagagttatccaacaattggaaggcgcctttgctcttgtgtttaaaagtgtccattttcccgggcaagcagttggcacaaggcgaggtagccctctcttgattggtgtgcggagtgaacataagctttctacagatcacattccgattctgtacagaacagctaggactcagattggatccacatggtggggatcacaggcagaacgaggcaaagacaagaaaggaagctgcggtctttcccgtgtggacagcacgacatgcctgttccctgttgaggaaaaggcagttgaatattactttgcttctgatgcaagtgccgtgatagagcacaccaatcgtgtcatctttctggaagatgatgatgttgcagcagtggtggatggccgtctctctatccaccgaattaaacgaactgcaggagaccatcctggccgagctgtgcaaactctccagatggagctccagcagatcatgaagggcaactttagttcatttatgcagaaggaaatttttgagcagccagaatctgttgtgaacacaatgagaggaagagtcaattttgacgactacactgtgaatttgggaggtttgaaagatcacattaaggagatccagcggtgtcggcggttgattcttattgcttgtggcacaagttaccacgctggtgtggcaacccgtcaggtcctggaggagctgaccgagctgcccgtgatggtggagcttgccagtgacttcttggatagaaacactccagtctttcgagatgatgtttgctttttcattagtcaatcaggcgagacagctgacaccctgatgggacttcgttactgtaaggagagaggagccttaactgtggggatcacaaatacagtcggcagttctatatcaagggagacagattgcggggttcatattaatgctggtcctgagattggcgtggccagtacaaaggcatacaccagccagtttgtgtccctcgtgatgtttgctctcatgatgtgtgatgacaggatctccatgcaagagagacgcaaagagatcatgctcggactgaagcgactgccggacttgattaaggaagtgctgagcatggatgatgaaatccagaagctggcgacggagctttaccaccagaagtcggtcctgataatggggcggggctaccattatgctacatgccttgaaggggctctgaaaatcaaggagattacttatatgcattcggaaggcatccttgctggtgagctcaagcacggccctctggccttggtggacaagttgatgcctgtcatcatgatcatcatgcgagaccacacttatgccaagtgccagaacgctcttcagcaggtggttgcacggcaggggcgtccagtcgtgatctgtgataaggaggatactgaaaccattaagaatacaaaaaggacaatcaaggtgccccactcagtggactgcttgcagggcattctcagtgtgattcccctgcagctgctggctttccacctggctgtgctgagaggctacgatgttgattttccacggaatcttgccaaatctgtaacagtagagtaacagacacctgaaacttaagacagttaagcaacacgagataccttttgtatttaaatttttgatttaaactattgcctcctg

SEQ ID NO: 152 - protein, 695 aa, Mus musculus
MCGIFAYLNYHVPRTRREITLIKGLQRLEYRGYDSAGVGLDGGNDKDWEANACKIQLIKKKGKVKALDEEVHKQQDMDLDIEFDVHLGIAHTRWATHGEPNPVNSHPQRSDKNNEFIVIHNGIITNYKDLKKFLESKGYDFESETDTETIAKLVKYMYDNWESQDVSFTTLVERVIQQLEGAFALVFKSVHFPGQAVGTRRGSPLLIGVRSEHKLSTDHIPILYRTARTQIGSTWWGSQAERGKDKKGSCGLSRVDSTTCLFPVEEKAVEYYFASDASAVIEHTNRVIFLEDDDVAAVVDGRLSIHRIKRTAGDHPGRAVQTLQMELQQIMKGNFSSFMQKEIFEQPESVVNTMRGRVNFDDYTVNLGGLKDHIKEIQRCRRLILIACGTSYHAGVATRQVLEELTELPVMVELASDFLDRNTPVFRDDVCFFISQSGETADTLMGLRYCKERGALTVGITNTVGSSISRETDCGVHINAGPEIGVASTKAYTSQFVSLVMFALMMCDDRISMQERRKEIMLGLKRLPDLIKEVLSMDDEIQKLATELYHQKSVLIMGRGYHYATCLEGALKIKEITYMHSEGILAGELKHGPLALVDKLMPVIMIIMRDHTYAKCQNALQQVVARQGRPVVICDKEDTETIKNTKRTIKVPHSVDCLQGILSVIPLQLLAFHLAVLRGYDVDFPRNLAKSVTVE

SEQ ID NO: 153 - DNA, 6195 bp, Mus musculus
gagctgtcgcatcccagagtcctctcattgccaccaccccggcccgagctcaccctcgcttctgaagctctccgcgcgcccgacagctcagccctcgcccgtgaccaacatcatgtgcggtatatttgcttatttaaattaccatgttcctcgaacaagacgagaaatcttggagacactaatcaaaggccttcagagactggaatacagaggatatgattctgctggtgtgggacttgacggaggcaatgacaaagactgggaagccaacgcctgcaaaatccagctcattaagaagaaaggaaaagttaaggcactggatgaagaagttcacaaacaacaagatatggacttggatatagaatttgatgtgcatcttggaatagctcatacccgttgggcgacacatggagaacccaatcctgtcaatagtcacccccagcgctctgataaaaataatgaattcattgttattcataatggaatcatcaccaactacaaagacttgaaaaagtttctggaaagcaaaggctatgactttgaatctgaaacagacacagaaaccattgccaagctcgtcaagtacatgtatgacaactgggagagccaggacgtcagttttaccaccttggtggagagagttatccaacaattggaaggcgcctttgctcttgtgtttaaaagtgtccattttcccgggcaagcagttggcacaaggcgaggtagccctctcttgattggtgtgcggagtgaacataagctttctacagatcacattccgattctgtacagaacaggcaaagacaagaaaggaagctgcggtctttcccgtgtggacagcacgacatgcctgttccctgttgaggaaaaggcagttgaatattactttgcttctgatgcaagtgccgtgatagagcacaccaatcgtgtcatctttctggaagatgatgatgttgcagcagtggtggatggccgtctctctatccaccgaattaaacgaactgcaggagaccatcctggccgagctgtgcaaactctccagatggagctccagcagatcatgaagggcaactttagttcatttatgcagaaggaaatttttgagcagccagaatctgttgtgaacacaatgagaggaagagtcaattttgacgactacactgtgaatttgggaggtttgaaagatcacattaaggagatccagcggtgtcggcggttgattcttattgcttgtggcacaagttaccacgctggtgtggcaacccgtcaggtcctggaggagctgaccgagctgcccgtgatggtggagcttgccagtgacttcttggatagaaacactccagtctttcgagatgatgtttgctttttcattagtcaatcaggcgagacagctgacaccctgatgggacttcgttactgtaaggagagaggagccttaactgtggggatcacaaatacagtcggcagttctatatcaagggagacagattgcggggttcatattaatgctggtcctgagattggcgtggccagtacaaaggcatacaccagccagtttgtgtccctcgtgatgtttgctctcatgatgtgtgatgacaggatctccatgcaagagagacgcaaagagatcatgctcggactgaagcgactgccggacttgattaaggaagtgctgagcatggatgatgaaatccagaagctggcgacggagctttaccaccagaagtcggtcctgataatggggcggggctaccattatgctacatgccttgaaggggctctgaaaatcaaggagattacttatatgcattcggaaggcatccttgctggtgagctcaagcacggccctctggccttggtggacaagttgatgcctgtcatcatgatcatcatgcgagaccacacttatgccaagtgccagaacgctcttcagcaggtggttgcacggcaggggcgtccagtcgtgatctgtgataaggaggatactgaaaccattaagaatacaaaaaggacaatcaaggtgccccactcagtggactgcttgcagggcattctcagtgtgattcccctgcagctgctggctttccacctggctgtgctgagaggctacgatgttgattttccacggaatcttgccaaatctgtaacagtagagtaacagacacctgaaacttaagacagttaagcaacacgagataccttttgtatttaaatttttgatttaaactattgcctcctgaaagcctttttttagtaaatcttatttatatatcagttataattattccactcaactaatgatttttgtgcaattgtctcattttcaataatacatgggggaatttgattcatagaatttaagtctaaacctaaaatcagagagatctcagctgtattttgttcagagaactggataatggatttctgggccctccatttcatagaggaggcttggtgagtgtcaaggcgcttggtgtttgcttcagcataacgtgattcggtcagtcagactgagggaagaccagtgcattgaattggatactccaagtcagtgtgtgccagtgcctggacagccaccaaaggctttgctgcgctacttataaatagaagatgctgcagtttatgttgaagcttatttctgttttgtttttaaatcaaactgtacaccaaaaaacttggtgagatttttatcttagtttagttaaattagttcgaacatgtctgtcatctctgtagacagtgcgtttgggtcctccacacctgcagagaagaccttgtggagtttggaaaacttgtgctgttagacattgatatgtggctggacatttgaagataggacacagggatccactccttatttcttcatctcttaagagtagttggcattttctcgcaactgtagagcttcactgaaaagcaagtactgtttgttgagtgacgtactttgtagctgcctttggcatcgtagcaccgagttgctgtcaagcctcaaattggtgtcagggtgctcaattctctcttcagctttgtcccaagaagagtttcctgcagttacctttacttcctcccctgccttgttgcagaaagcatcccttggtgccagtgtagaagttctgcttggggggtggcaggccttgctgctcatttgaccctcagtgtatgtggcaggctcagctgagaacggcacatacttggcactgtggagtgacgtcagtttcagggttgttttctcgatgttttccttgggactgttttgactcctgttgaggagtgaatgcagtataaatacgtgagactgtcatgccttcagctaattgtgtcagaaatgcaggtcagcaagttggataaaatatttaaaatagaacattagtttgacaccccaaaaatgtgcagagtaatttcttcacagagctatttgggtcagattgtgtgggcagtgggcaggtgtgtgtgttcaagttaggtccattgttttcaaaagctttcacctgtacacggtgaaagcgcagtgcttcacggagtcatgctttgtgtttgaacttagtggtaagcagttaacacttgtgaaggtgagttgaagaaaaagttgatgtcactttagacatttcagaaggcttcactcacactgatggaggctggaaacctgattttgataacccaagacagggccacagtttgtactccatgtcactgctttgggtacgtttctctgttgtatttgtccctaagacttcatgttagtggagcatgtgtgtaaggtcatttcttaggcctgatgtggtagcacagctgctcgtgtttgggtgtggcttttgtttggtgtgtggctctggagcacagggtgatgttggtgtgttgagacactgaaactgggagacgatcagctcagtgctgtctggtcactcactgtcagctcagtcactaccccggggtcctgttggagcagttttggattatacagctcagtcttgctaaccaccctccgtgcagcggaacgtcacaactctttttgtcttctgtctatgatattgaacccatttaccagtttctcatccatacacactccaagctagaataaatactaaaccagtcagaaacccagatgaggaccagggtagtactgtctaaacaaatattattgttttccatatcccattttgctttctacctaaattcttttattagttcttaatacccagatattttagcaaggcaaggcactaggtgagtaggtcccactaatttggtataatacaggacatagaaatctaatttttcaaaacaaaaataccctgtaaaagggaggctttctattaaaattcccccccccccaacccccagctccctgtttttcaagacagggtttctctgtgcagtcctggctgaactggaactcactctatagattaggctggcctcgaactcacagagatctccctacctctgcctccggagtgctgtcattaaattctaatctatctatctatctttctttctttctaaaaagtaattattttatttgtttacatttcaaatgtcctccttcctggtttcccctccatgaacctcccaccccatccccctcctttttgcctctaagagggtgctccccaccccctcctcaccccctagcatctcccttctctggggcatcaggccgccacaggaccgagcacatttatagtgtgtttaagttcacacacacatctttacctgggagtccttgctaggcagggaggactgaggcacctgacacatggcccacttgatggttactactttctaaaaaagagaatctatgccgtaagatagaaaggttagaaggtgagccactcactcttagcctgtgactggctcggcggctgtgtatgagcggctgccatgctgggcagcagagctagaccctcagagcagttgtgactgtccctggtggacctggtccttgtgaggctcaggagggagggtggaaaggtggagctgtgctgaggtattaaatgctgggcctgggtttgtttgacatgttcataagcagctgccccggcctgtccgtggaacaggggactataaagaacagcagttagtaatatgacaagcagttgtgtgtccctgctcagcagagtgatgtcacagggtactgtgcagaaggctgttagttcagaacaccaacatcagctttttaatagcaggttgtttctgaagtgacaggtggtaaccctttcagtccaggcctcttgcctcagtggttctgaaggtgggaggaaaggaggctggacttggtcccatgtagagggaaactaacactttcacaacacaccttcagtctttggggttactcttttatctttttttataattaggatattctagagcaataaaagagactaaggttacctgtttattatatacattaactggtatgagttttctaaaaaaaataataaagcacaatgtcattggaaaatgtttgtttaaaaaaagaattcataatttacaacttgggaaggccaaagacatggaagggaagggtaaagacattttgatttatgacatccacattttgatttatgacaacccatagtgggttgtgtgtacagtaatactacgcagggttttaagcttggagacatttcacatggcttttatttagtttcacattcaaaagttttaacataaattggactttttcactgtacttaaagattgttaataagtatttcagtatcttcatagctagaatttatttaaacatatcctcagatctgggatgataacagataataaaactgacagcattggctttgaatagtaatgtccatagttttaagcaagactgctaagttgtgttgtgttgactgtaagtccgtacgctcagtagtgatgttctgaaggctgatgatggcatcagaggaaacgtcaccttatcttgtttctgcactagtttccagagagtgtagaaatggtcttgctaatttttgaatgttctttggttgaatgtgtttttccattaataacatttttatatttgtttaaattatacttctgtgggactgggggttagaataatcattgctctgttttgattttgtattcttttaaatgaatgtttagttttctgagccagatggttatttcatccttgtgtcctgttcaatccagtgactacaccggaactgtgaataaattacccaaaacctt

SEQ ID NO: 154 - protein, 679 aa, Mus musculus
MCGIFAYLNYHVPRTRREITLIKGLQRLEYRGYDSAGVGLDGGNDKDWEANACKIQLIKKKGKVKALDEEVHKQQDMDLDIEFDVHLGIAHTRWATHGEPNPVNSHPQRSDKNNEFIVIHNGIITNYKDLKKFLESKGYDFESETDTETIAKLVKYMYDNWESQDVSFTTLVERVIQQLEGAFALVFKSVHFPGQAVGTRRGSPLLIGVRSEHKLSTDHIPILYRTGKDKKGSCGLSRVDSTTCLFPVEEKAVEYYFASDASAVIEHTNRVIFLEDDDVAAVVDGRLSIHRIKRTAGDHPGRAVQTLQMELQQIMKGNFSSFMQKEIFEQPESVVNTMRGRVNFDDYTVNLGGLKDHIKEIQRCRRLILIACGTSYHAGVATRQVLEELTELPVMVELASDFLDRNTPVFRDDVCFFISQSGETADTLMGLRYCKERGALTVGITNTVGSSISRETDCGVHINAGPEIGVASTKAYTSQFVSLVMFALMMCDDRISMQERRKEIMLGLKRLPDLIKEVLSMDDEIQKLATELYHQKSVLIMGRGYHYATCLEGALKIKEITYMHSEGILAGELKHGPLALVDKLMPVIMIIMRDHTYAKCQNALQQVVARQGRPVVICDKEDTETIKNTKRTIKVPHSVDCLQGILSVIPLQLLAFHLAVLRGYDVDFPRNLAKSVTVE

SEQ ID NO: 155 - DNA, 87417 bp, Homo sapiens
  misc_feature (1)...(87417): n = A,T,C or G
ttttttttgagacggagtcttgctctatcaccaagctggagtgctctatcaccaggcactaggctcactgcaacctccacctccccagttcatgccattctcctgccttagtctcccgggtacctgggactacaggcgcccaccaccacgaccggctaattttttgtatttttagtagagacggggtttcactgtgttagccaggatggtcttgatcttctgccctcatgatctgcctgcctcagcctcccaaagtgctgggattacaggcgtgagccaccgcgcctggccccagttaattatttatagtcttttctgcccagctgagactctgctatgggtagcctctttgagacaaggagaagtgatcaatgctttaattaatttccaaatatttaatttgcttttattttattttattttttttttgagacagagtctcgctgtgttgcccacgctggagtgcagtggcgcgatctcggctcactgcaagctctgcttcccaggttcacgccatcctcctgcctcagcctcccgagtagctgggactacaggcgcccgcctggctaattttttgtattttcagtagagatggggttgcttttatgtttttaggataccgggttatgattcaaaccttgttctttggggctgttgatagatttattcttactggcttgtcatgcctcattatagagtgtatcaggtaaagaagtaatattaaaatcaggaaaacagcaaaatctaatcattttcttaattcttaaattgtctttgttttttggttttaggttatggatgatgaatcagatgaaaaagaagcaaactcaccttaaaataatctggattttctttgggcataacagtcagacttgttgataatatatatcaagtttttattattaatatgctgaggaacttgaagattaataaaatatgctcttcagagaatgatatataaatattgcatgtttgctttacctcatatgagttatttataacctcttgaatcatcttctgtacacgtggattttatccaaggatatttttatttttgtccctcatttcccatggctctttctttgcatatgtgtgaaggagtttaaaatacatttccccccatctaatttatttacttttttccatacaggaagaaacagaatgctttttagaatattctaaaatagctttttgtgaaatatctaaaactatttttactgaagtttttagcttaagaaacagctaaacaagtctgttttaaaaatggtatctggctactagcccccaattaagtagcaaagaactgcttaagaccaaaaaaaagaaatcaaaaatgtccgggtatggtggctaacgcctataatcccagcactttgggaggccgaggtgggcagatcacgaggtcaggagtttgagaccagcctgaacaacatggtgaaaccccgtctccactaaaaatacaaaaattagccgggcgcggaggcacgcgcctgtaatcccagctacttaggaggctgaggcaggagaactgcttgaacccgggaggcggaggtggcagtgagctgagatcacgccactgcactccagcctgggggacggagcgagactccatctcaaaaaaaaaaaaaaaaaaaaaaaaaaaaaaggtgaaaaacttgaaaactaactcccagaatctggacacagtttctattggttaagatggagatggccaaattagaaaaactgcctcagcatgcccagcctttaccttatcaatcagaattgctgaagaaaagagaagaagctgctttggtcctcccactggcttctgactcagagatccaaaatctgtaccatgccagaagtgtgcatcattatttttgtactctaggggtactgctttttcaggtagccaaaagagtgatttagcctcctctctcatttttctacagtaattcagagactgcagttaacagaaaatacagggaaaggaaagatgggaaaaatagttgtgatgcattgcatctctggaattctagtccctcaaattaaggagattaagatagtgatggaaacaggaagaactctagcagttgtgagtgctgggaattgaagtttttacttttatcctttggttcactgaaccaaatagtagggttggagaattcattccttgagatatcatgtatgaatttaatttagacactgggaattgcttcataagcaaggcaacttaacctgccctttagttgaagctacaggaaattgacatcgtggatgagatgccagtaatggcagatcttgtatgtggccatgaaataagtggctgaattggatggaggattagtttattagaagagaggaaattggcctggcgcagtggctcatgcctgtaatcccaacactttgggaggctgaggtgggtggatcacttgaggtaaggaattcgagaccagcctggccaatggtgaaaccttgtctctactaaaaatacaacaattagccaggcaaggtggcatgtgcctgtaatcccagctactcaggaggatgaggcacgaaaatcccttgaacctgggaggcggaggttgcagtgagctgggatcgtgccattgcactccaacctgggtgacagagcgagagtctgtctcaaacaaacaaacaaaaaaacaggaaattattcaattgagaggccaaagaggaagagaggaaagattttctacaaaagcaacagccatgaagaacaaggaggaaaggtgtgggaagaacattctaggcataagaacagtataatcagaattgtaagtgtgaaatgtatttgggaacctcaagaaactaagtatggcttgagtataaagtgaaaatggtgcatgagtaggcagtggtagtatagagagtgccacagaaactcttggttgcctacccaacatacaccctcacttcttgttaaggaaggcactctcagtaggtctcacctcagtcccaggggatagttatgattaaaccagtcactttaactccatttttcttttccagtcattagtctgtgggtagccatatgacctagctctggccagtaaactggaagagaaagtctattggagaattctggaaagattgtctttcctagttaagagagtgtgtatgtgagttaatctctggaaagaaggctcttttttttttcctccatccattccttttcttcctgcttggtacactgtagagtgtgatgttcaaagcaatgacagtcaacttgtaatcatgactaaaaggtggtccactgagaatagcaaagagcaaagaaagggtctggatccttggccttgcacggtggctcacacctgtaatcccaccactttgggacacccaggcgggtagatcacttgaggccaagggtttgagaccagtgtggccaccatggtgaaaccccatctctacttaaaaacacaaaaattagcctggtgcagtggcacatgccacctagtagtcccagctactagggagtctgaggcttgagaatcacttgagcctggaaggtggaggttgcagtgagccgagatcacatcactgcactccaccatgggcgacagcaagactctgtctcaggaaaaaaaaaaaaagggtctggatccttgaggcattgttggccttttggccagactaagaattactcactttcagagtttatatgatgtgagataaatgtttttcttgttttagctattgttatcaggtattctgtaacttgaagctgattgcattctgagagactggtaaatgatggaggacttggtaaatacttttaccgatttttcatttgtggtaaactgccaaatgtcaaccttaaaatgaaaacaggccggccgcggtggctcacacctgtaattccagcactttgggaggctgaggcgggtggatcacctgaggtcaggagttcgagaccagtctggccaacatggtaaaaccctgtctctactaaaaaaatacaaaaattagctgggcatggtggtgggcgcctgtaatcccagatactcgggaggcagaggcaggagaaccgctggaacccaggaggcagaggtggcagtgagccgagatcacgcaactgcactccagcctcggtgacagagcaagacgccatgtcaaacaacaaaaacaacaacaacaaattaacatgtattttttaattaattgaaccactattcaaaggttaagtttaatcaggtaatggtttttattctggaatatttatactgaatttctccctatctaatcccaaagaaagactaataatcactattagttgtgtttagccagaacaaaaattaaacaaaaaccaaaaatacaagaaacccccaaaatgtataaaatattttgtatctattttatttttttctttttaaaatagagatggggtcttactctgttgcccaggctggagttgcagtggtgcaatcatagctcagtgcagcctcaaactcctgggctcaagccatcttcctgcctcagcctcccaagtagctaggactacaggcatgcacaaccatgtccagcttttataaaatattttacatgaaatatcctgaaaacactttgtaaatatgggatgcttcagtaagtatttgaaactaagattattggtcaagagtaagccaggcacttggagggtttttctttttgagacagggtgtcactctactgcccaggctggagtgcagtggcgtgattatgggtcactgcagccttgacttcccagactcaagtgattccccacctccacctctcaagtagttgggactataggtgcgcactaccacacccagctaattttcggttttttttttttttttttttttttttttttttggagagacgggattttaccatgttgctcaggtggatctgcaactcgtgggcttaagtgatccacctgcctcagcatcccaaagtgctgagattacaggcgtgagccaccacgcctggcctgaggatttttcactaaccaaaattaggatgaagccctatgcaggatgacatacagtcacatgagagcaacatatataaaaatagcaaacgttcattgaacattcagtgttcatttattcattgaacatccttcatcctcaagcctgaggttttcacaaagactgttctaagcaccttatatttatgaagtcatttaatcctacgtgatagttaactattgtccctcctccgccccccccaccgcccctgcctttttattttgagacgaagtcttgctctgtcgtccaggctggagtgcagtggcaccatctcagctcactgcaacctcctcctcccaagttcaagcaattcttctggaattacaggcatgcgccaccacacctgactatttttgtatttttggtagagacagggtttcaccatattggccaggctggtccctgacctcaagtgatccacccgccttggcctcccaaagtgctgggattacaggcttgagccactgtgcccggcctattgtccccatttttataaactggaagatggaggcacaaggaaaagtacattgtccattgccatgcaacttgagtggaaaagctaggaacatgaactctggcattctggctgcagggcctatgcacattatagctatactattctgccttaaggaagttgggctcatacccctcttgagtattcctacttgagggaggagagaagctttccttgctttcatagctacttacgagtgggcaagagtctagaaccacagtagacaaaagcagtggtatgtacatgtgtgtccatttttttatgcaggaatatgaaactagttgctttccagtccagagggaatctacacccctcttgggaaatcccagccatatactccattttgccatatcagtgttatctgtgattattccctaggagcttacaagatacacagaagcaacttttcaagtatcccttgaaagaaaccctagaaaaatagtactttttctgtgtccttacgtttcaagtgatctttcagttctaggcagctccctgaatggtccaccccttattgtggctctgttcacatccaacaggacagaaatagtaggttaaaggtaggaccagtttatctcatggttttcaatttgttgactttcttggcagtagaaagagtttctttctcgcagagctagaaaactctgccccagcttctgcctactggaaaaatttggagccacgttggagaggagtattggggagggcatagcttctagttggagttagcatcctttgtcctcaagcctcaggttttctggggggcaatcaggtcatatttgcttgatgcggtggacatatttttttgtgtgccttcttggtgttcttcttttagcaacaccttcccctttcctttgaagaactgcttcctcttgccgtatgtggctatatgactctatagggctttggtggagctgtcctatcacaatgtcttgccttctttgccacaggagtggggcatgtgactcacgctggactggccagaatccttgtctagaatataaaaagtaaggatggaggaatagcctctctcattttgggctgcaagctataaagttgtgattacagagctatttgaggattatttccctgtccatgaggtcagagaggtagttcaagagttctgacaacattctgtccctgggtataaatgtgctgaaagctgtttgtattcctgttctttccaattacgtgagctagtaaatccccttctttagtttgagtggtcttctatttattatttgtcagtgaaagctctgccctctaggcacatctttcaccatgactgtgagaaataaatttgtgagagctgcatccttgaagagctctgtgaaagctctttctgtgggagtgctgccactgaattgggaaatctagtactcatcctgtgggtgaagagtaaccacgatattggaagcaaggaaaaactggatcacatttgtatttttgacaggtccctctggagccaaagtgtgtgggatgaactgcgggaggctaaaggggttcactcaaagggtctttctgaggccttgattggtgccttttgttcttgtcctcatttcttttcacaggcctcaggggctcaacctatttctttttcctttgatacttgctaccatcttctctgtccactggggtacatttctccacaaagctccctaaaaagtaggacatatgtaccccagctccccatattcttatgcaaaggaatttttattttaataattttattgctattactggaattcacataagggttaataaaaatgactacagctatttcaattaaggttcttcgttgcgttagtaatggcaactggaagctctgatggccttcagccatcagatccaatgggactgaatctacgaacagggaaatggacttacataaagagatggtgaatgacacccccttgccatcattactttttttgttgtcgttcagaatgttttgatcaggagagaaaatccattccctcatttgtttgaattagacccagatgtccccttcccttcatagatcatttattttcttctccttcaggccttattcccaaaggtccagttaaggcggagctctgtataaagggaggtcaggcacccaaagtgtgtatcttaactggcgcatggttacaaagagttctttgttgtgttgggttagtgaggttcttcaaggctgatttgggaaaatactgtccttcaaagtttcttctcttttttgtcaaattatttttttatttactttttttttaacttttttttttttttctgagttggggactttccagtctttactgaaaacttttaaaaatttgtatttagacaaattctaaaagacctgtaacactagtttcttcttctcaactgattcataaatatcttccaaaatagtttgttgagtggagatggataagacaaattgatagtcattgtggtggagtagcaggcagaagaagaaagcaaagggttaaatagattactatagttggagcatgagaactctggtagtactgctgacattttctttgtggcattgacaggtttgctgccagtgcacaaagatgttgcttaagcattggaaccataccttggcttttaggtaatacaacggagttctaaccagagccttagatgagggttctgaggctagatgtatatccacagtcttttgtttcttgaattaagaaatgtattattaccaaaaagctcactgttttttttttttttaaactttgctctgggtgatccagggacctgtttaagggattgaaatatcaaaagggcttttaggtgagaaatactctgcttagttaaatgtgacatttttcagcttctctgaggcaagtgaaaaaaggcacttttccccgtaagaagaactgaaagccttatgctcacttaatcatataaccagccatagaaggttaattccgctaagaaaataggactttttttcactcattccaaaataaatttgatcttttactttgtgctgtggtctaaaagtgttgggtatgtaaaatctagttctagcttcaagaaacttacagcccagtgggaaaatacagaaaatcataaaatatcaaagaatatttctttacagtgagtagctcaaagagtaagaggttaatgcatgtctccaagtctgtctaggggggataaaaaaggctttcctgaagaggtagcatctaaacagagacgtggtggggattctatgcagagtaaccaaagtgtgcaaaagatttgagaatcttggcccagttgaggaactacctgttgagcctgttgggagtgtatagggctggaaggacggctaagaccagacacatgaacagcagtcagcaggctaagaccagacacatgaacagcagtcagcactccaggaattctgtgtgccatgtacgtttttgatactactctactctagagccattatagagttctgattactccacatttgactaaagataccatttaaggctgtttaaagcaaatgcccaggtaataaattctcagaaacatcatccctctctaatcaagtctctcttgtcagacatggcgcattaattcatagaatgaatcgttcgtaagtcaaacgcgcggctgttaaagctagggaattcctagccgtctcaggtgggtcatgggaggaggtgggccagcagtttcttacgtccaggctcatagtcggatagttgagccttacattcctcctctacccctccacaataaactgagggttatggaggcaacggatgcggagggcttttaggggccaagcatattacacaaggaattgaattgcttattaccagagaggctgacctttggggctttacagtcaagaattttgttatctctctcctcccacctcaacctaattctttgcaatttttttcagccttatgttccccaggattcccttttcatacttcctgcttttttcctcctctttcctcgcttcgtgcagtgctggcgcctggggcctggggctgcacggggcacgcacccgggctattgctttgctaacaattccatccttctctttccgtcattccctgccaggtgctgagtttctccctcnnnnnnnnnnnnnnnnnnnnnnnnnnnnnnnnnnnnnnnnnnnnnnnnnnnnnnnnnnnnnnnnnnnnnnnnnnnnnnnnnnnnnnnnnnnnnnnnnnnnnnnnnnnnnnnnnnnnnnnnnnnnnnnnnnnnnnnnnnnnnnnnnnnnnnnnnnnnnnnnnnnnnnnnnnnnnnnnnnnnnnnnnnnnnnnnnnnnnnnnnnnnnnnnnnnnnnnnnnnnnnnnnnnnnnnnnnnnnnnnnnnnnnnnnnnnnnnnnnnnnnnnnnnnnnnnnnnnnnnnnnnnnnnnnnnnnnnnnnnnnnnnnnnnnnnnnnnnnnnnnnnnnnnnnnnnnnnnnnnnnnnnnnnnnnnnnnnnnnnnnnnnnnnnnnnnnnnnnnnnnnnnnnnnnnnnnnnnnnnnnnnnnncctggcctcgcgggccgtgtctccggcatcatgtgtggtaagggggccgggagcggggggcgtgttgccgggtggcgctggggtgcggtgcgggtgccgctaaggcccaaggcgactgggcggaagcgggagtgtggagggtgcgaagtctgggtgatgggcaaggggcgcccagtggtggctgcgggggcgggggccggcatccacgggcgggagagggggtggcggccgggagaaaggcacctgagaggaaggcgggccccctttgccgggggctagcgggcgccttggcgcggagaaggaaccgaaaggggagagaaacgcctttattgaaaaaggaggagagagctgagggaattgaggtgtggagggggttgccttcaaaagggcccaccaggtgagtgaggaaacctgtggaacctcgggcgaggtctcttgaacttaccttgcatttttctaaaaatctttaaaaaaatattttacttgtttctggggaggcccaatagaaaacagaccctagctagagccacggtagtgccattaaacgtgatacttcctgccatcccttgtctcaacagaaaccattgctaatcaataacttggttcatgggcttagacctgatcctctggtggaagaggccttcaaatgtctgtggcgataggttatacataatttatcatttgcgtgtgcacccattaaaaatgccagctctgaaaaatatcagttataccttggatgtatacccctttagaataccaactatgaaaaatatcatttatcccttgcatgtgcatccattaaaaatactagctatggaaagttgagcaaatatctttcctagagccttaaaaaattaaggttaggcccttttattccatgttttgagagtcgtttattatgacctaagtgttagtgaaagagactttgagaatcgtgtctgacatgactgatatcttctaaaattggtgttaatttggctattgccagtaaaaataattgtattcttacctttcttattgaaatttacaaccgactttatccctggaagaaagtacactttttttttttttttttaaagggaagtaccattgtaagagaattgaaaactctctgggagacttcttatttgcagccttttacacgaaggaactgaacaggaggtggattgtactcgttagtgtatatatttcctgtatttaactttatgctcatttcagcttctgaaaatgaggagcaggtttaaatttagagtagattaaaaaaaaacccacataaaaacagaaacacctataaatagcttactgaaattattagagtagagctgacttcagaatcagacttttgcagtgtctacttagtagaatggttttgcatttagtttggagctgtgaagtagtgaatttgcaaactggtcaatctccagtgtgcttcatttggtagttaactgttcctgaatgatgaggggtgtgcctcatcaagtactcaacattctggttgcaggtcatttcatcatgttccaagaaaaaaacgtagtcaaagtacttactgaaaaaaaaataaataaataaataaatcagcgctgggcgtggtggctcccgcctataatctcagcactttgggaggccgaggcaggtggatcacctgagctcaggagttcaagactagcctggccaacgtggtgaaactccatgtctactaaaaatacaaaattagctgggcgtggtggtacgcgcctgtaatcccagctactcgggaggctgaggcaggagaattgcttgaacccaggaggtggaggttgcagtgagccgggatcgcgccattgtaatccagcctgggtaaaaaagagcaaaactccatctcaaaaatgataaataaatataaataaataaatcagatatggaaatcaggttcagataagggagatacctttagggtggagactaaatgttgggagttttcacatagtttgtgtctccattccatagagttttacggctgaggaaacaggtattgaagaaataaaaagtgaatatttgaggcatttctgaggtcctgcttttaagtcataccacggttttgcctgattctagggatagggttcagaatttattttctctctaatgtaaattctgaaagataagaagatgagtgtcattattttcctcccacatcttagtcattgaactaaaattcctgagcagagaaatggagtgaaaattagactagatgggaaaatctggaagcttactttctgattacttgctatctagttaagtttttctctttctttccttctttcttttcttttctttctttctttctttttctttctttcttctttctctctctttctttctttctcttctttcttttctttctttcttttttctttttttttttttttttttgtgacggggcctctctctgtcgcccaggctggagtgcagcggcatgatcttggctcactgcagcctctgtctccggggttcaacctcccgagtagctgggattacaggggtgtaccaccacacctggctaatttttgcatttttggtagaggtggggtttcaccatgttgaccagactggtctgctgacctcaggtaatccacctaccacagcctcccaaagtgctgggattacaggagtgagccaccttacccggccctagttaaatttgcctaaaagattattttatttcaacgttgtgcattgttgaagcagaagaatgaggattgaagattctgatgtgctttttttcaatcagatatactgataaaattgatatgtttaccagcttgtattgggatgttaataagtgttaggaaaaaagatcctctggtccagtaaatttgggaagcaacatattaaatcgcgtggtaatgttttgttttgttttttgattggaggatttcttggaatctttaatgtattaataataagcattgagaatctcccagagaagaatagtgtgtctattttccaaatttattttatcttcctttttcttggtagtttggaatatactttgtcctttttatttgcattatttttggttttgctgagtgtcaagtcacttaagctatccctagcttttaacagattttgctattgtttttataaatgtgaagttatacccttctgattcgacggtgtatataaaatggaattttggggatgggcgcggtggctcacgcctgcaatcccagcactttgggaggctgaggtgggtggatcacctgaggtcaggagtttgagaccagcctgaccaacatggtgaaaccctgtctctactaaaaatccaaaaaaattagccgggcgtagtggcgcatgcctgtaatcctagttactcggaagcccgaggcaggagaatctcttgaacccaggaggtggaggttgcagtgagctgagatagtgccattctactccagcctgggcgacaagagtgagagactgtctcaaaataaataaataaataagtaaataaataaataaataaatggaatgtttgcaaatgagatcctttttaaaagcagtaaaggaacttgcaattttaaagtatcctaaaatgaatttttcaaaagttttttgtaattatactgtctaatggctttggagataattgagggatgctgagattggctgctaggattggtcataaaaccagtactattaacatatccttacatatactggatatgaagaagttgtgagagaaaataattgcttaataagcatttcttcaattgtcccctggaaatggaggttaataggttctggtaatgagcagtagaaggcgggaaagggttttgtaacacaagtttgggaaattctgctcttggagattcacaattagcaagattaaaggttccagaaagttctaaatatatacctaactttaaccaggtagttcttaaacctttaattatgaaacctttctttacttcattcctttttagcatccggtgaaatagtgttctgtttctgtggtttgagaattttttgaccgtatatttcaggtgcctagaaagtgttagaagatacttgcaggtatttgaaatgatggctttatacttggcactctgccctttgcagagatgactaaaataagagagttgccttcaagaaattgctgcctgatcagaggaaagaaaatgaatgcacatgcaacagcttcaggtgaaaatacacagtccttgttcattgccatgtcatagaccacaagtagaatgagtagaaatttagagactggagagctctggggtttgggtttctgtgttaggttcaggaatgttctgggtgatggggcaggacttttactcaacttgtagagtattagtatactgtgagaggtaatcattaatggcatatgttaaccgtcagtgaatggaggcggaaatagtttgagaactactaccagatgaaggaggaaatagaagtgccaggaaaacagaccaaggaacagtggttaaaggcagaagagttccaaagtagtatattgccttgaacagagtctataaaagtagaaaaaggtcattcatatgtaatactgcagagaagttaattggatatggttatgaagaaattattagagaaattgcatatgtcaaggcagaagggtctcagtttgtgtttaggaggagggctgcaagtaatatgaaaaagaagaggattttgggattgaggtcccctgggagtgttgagaagttgaattctagagctgtggttcctgacctacaagccctgaagttgttacagggtgttcattgcttattcatatgcttataactttgtctgtaagttgaataaagattgttctagatcattgaataataaaaatttaacccattgttgtgaaggagcctcagaatattttgatgttaacaaaagagttctgtatttacaaagttggagaaacactcatcaagagttaggagtaaggcccagtgtggggttccctctggtaataccagcattttgggaggctgaggtgggcgaatcacttgaggtcaggagtttgagaccagcctggccaacatagcgaagccccatctctactaaaaatacaaaaattagccagctgttgtggtacgcacctgtaatcccagctacttgggaggctaagggaggagaagtgcttggacctgggaggtgaaggttgcagtgagctgagaacacgccactgtaccccagcctgggtgactgagtgacactctgtctcaattaaaaaaaaaaaaaagagttataagtagccagtgttttggcttacacctgtaatcccagccactcaggaagctgaggcaggaggattgcttgacgctaggagttcaagatcagcccgggcaacatagtgagatcccatctctattaaaaaaaaaaaaattagccaggcatggtggtgcatacctgtagtccagtctacttagaagactgaggtgggaggattgagtccaggagtttgaggctgcagtgagctatgattgtgctgctgcactccagcctgggtactgggtgacagagcaggactgttaaaaaaaaaaaaaaaagttacaagtaggggagaggctagcttcagagagtagtatgtgtaatatgtctctcttgagattacaaggaaggatgagaagtatttatatattgttaaactgttgaaaagaagatgggtgaggggcagtgactcatgcttgtgaactcagcattttgggaggctgaggtgggaggatcacttgaggcttggagtttgataccagcccggacagcatattgagaccttgtctctatattttaaaaacaaaaaaagaaaatgaagactttaattctggccaggcgcagtggctcacgcctataatcccagcactttgggaggccgaggcgggcagatcacctgaggtcaggagttcgagaccagcctggccagcgtggtgaaaccctgtcactgctaaaaatacaaaaattagccaggcgtggtaacacacgcctgtaatcccagctgctgctcaagaggctgaggcgggagaatcgcttgaactcaggaggtggaggttgcagtgagctgagatagcgccactgccctccagcctgggtgacagaacgagactctgtctaaaaaaaaaaaagactttaattctataaagtaagaatctaccaaaaatgaaaaagaagctgggaagagaaaatgaggatttgagagtagtatgtagcttagactactaaaataatttctgggagaagtttgaaagttaagcannnnnnnnnnnnnnnnnnnnnnnnnnnnnnnnnnnnnnnnnnnnnnnnnnnnnnnnnnnnnnnnnnnnnnnnnnnnnnnnnnnnnnnnnnnnnnnnnnnnnnnnnnnnnnnnnnnnnnnnnnnnnnnnnnnnnnnnnnnnnnnnnnnnnnnnnnnnnnnnnnnnnnnnnnnnnnnnnnnnnnnnnnnnnnnnnnnnnnnnnnnnnnnnnnnnnnnnnnnnnnnnnnnnnnnnnnnnnnnnnnnnnnnnnnnnnnnnnnnnnnnnnnnnnnnnnnnnnnnnnnnnnnnnnnnnnnnnnnnnnnnnnnnnnnnnnnnnnnnnnnnnnnnnnnnnnnnnnnnnnnnnnnnnnnnnnnnnnnnnnnnnnnnnnnnnnnnnnnnnnnnnnnnnnnnnnnnnnnnnnnnnnnnnnnnnnnnnnnnnnnnnnnnnnnnnnnnnnnnnnnnnnnnnnnnnnnnnnnnatggaatatttgaagattgtgagcaggaaagtacatgcttttttttctcaagaaagatgatgacataggttgactgtgagggaatgtatagagatgtcatgacttaactagtgatttgagctccagaatgttaaatgtgcaagagacgtgtcatggagccccttctagtggcaatagttacagtaaagtaggggagacatgaaccaattaaacacacaaataattgaaagtcttaattgtttcactccatatgttatttttgtatgtgtgatttattttattttacttttacattttttatttttttgagacagagtctcactgtgtcgcccagcctggagtgcagtggcgcaatctcggcccacttcaccctctgccccacctcctgggctcaagtgattcttctgcctcagcctcctgagtagctgggacaggcacgcgtcaccatgcctggctaggaattttgtatttttaatggagacggggtttcaccatgttggccaggctgatctcaaannnnnnnnnnnnnnnnnnnncctcccaaattgctgggattacaggcgtgagccacggcatctggcctttatatgtgcttttaggattgtagaagatgtaccttggctggatgcattggctcatgcctgtaatcccagcactttgggaggccgaaacaagaggatcgcttgagtccaggagttcgagaccagcctgggcaatgtagtaagacctcatttctacaagaaataaaaaaataactgggcgtggtagcttacgtctgtaatcccagctactccagaggctgaggcaggagaattgcttgaacctgggagacaggttgcagtgagccaagatcgcatcactatactccagccttggcgacaagagcaaaactccatctcaaaaattaaaaataaataagtaaataaataaataaattacaggcacattagcatgtgcctgtggtcccagctacttgggaggctgagatgaggggatcacttgagtccaggaggtggtggttttaatgagctgggattgtgccactgtactccagcctgggcgacagagcagacccctggtgaaaagaaaaaagaaaatgtatctcaaataatacttaattttaaagaaatcttaaatgtagaatgtgattccataattataatattgactagttcactgcaaccttgaacccctgggctcaagtgattctctcacctcagccttccaagtatctgggactacaggcatgcaccaccatgcctaattttttatttttggtagaggcagggtctccctgtattgcccaggctgatctcaaactcctgcccatgatcctcccgccttggcctacgaaagtgctgggattacaggtatctgctactgtgcctggcctgtagaaaaatttatagctgaaggactgggagtgtgtgtatgggaataacagtagttatctctgagaaaggggttggaacctgtgtggagacagaaaggagagattttcacaattctgtagcatctgtatagttttaatatttatttatttatttcaaattttaatagagacagggtcttggtatgttgccctggctggtttcgaactcctgagctcaagtaacctctgcctctcttcccacagtgctgggattacagatgtgagccactgctcctggcctactttgaatttttaatgatggtgatgaattaatttgtgactagcattataagaaaaataaaatttagagtttaagtgacattgtaggtagattttgattcagaagttttaagtttagagaatgaatttgaacacttatcactgataagttacaatgtttagggtcccaaaatattgcagctgtcaaatgataaaatatataaaaataaaatttagtattcataaggacataaatgcaaccagacataggaattttaataatttgacgagtcagttttcttttcagtaaggtttaacagtctgtatttgcagctacattgctttcaaccaggtgtgtctagtctgtgatccagattgcttctgaaattttgttagcaaggtgctcataattgcttttttgtcattgaatttaagttgccatttattgagaatgatgcctgtaggttcaagcatctgcttcagttatggagttattttattccaagtatattccattagtaagaaagcttacacttgtgaagtgcatgctgatttgggggtagagaatctatgcttatacagctactgtgtgtgctcttagagcaattactgaagagtggcggaaagttgatattaggcttttgtcattaccttacttaagaactgtttattgggagtttaggccgggtgcagtggcttatgcctgtaatcctagcactttgggaggctgaggcgagtggatcacctgaggtcaggagttcgagaccagcctagccaacatggcgaaaccccatctctactaaaaatacaaaaaattagccgggcatggcggcggccactgtaattccagctacttgggaggctgaggcaggagaattgctggaacctgggaggtggaggttgcagtgagctgagatggcgccagccttggcgacaaagcgagactctgtttcaaaaaaacaaaaaacaaaaaactgtttattgggagttttgataagacaagtcaaagacctgaaaatagaggtcagactaacgatttctgctctaacaagcatcattgtgagttgtgaatgcctcccttgtgaacatgccctgtgtacctgatgaattgctgccagtattgtctcgggcaccccaagattacagttaacccggtatccccgcaggtggaatgtcttgggctagtagtgctatcaagggacagggctatgaaactgacaggttcaacttcttagctcccattttcctcatcaggtatgtctgaggctaatccccttccttcttctagctctgttacttttttgtttgtttctttgtttgtttttttgagacggagtcttgctctgttgcccaggctggagtgcagtggtgcagtctaggttcactgcaacctctgcctcccaggttcaagctattctcgtgcctcagcctcccgagtagctgagactacaggcacgtgccaccacagctggctattttttttttttttttttggatttttagtagagacggggtttcaccatgttggttaggctggtcttgaactcctgacctcgtgatccgcccgcctcggcctcccaaagtgtcgggattacaggtgtgagccactgtgcccagccaaaatgttcttaagctctcaagattcatatagtgagccattataaaccaaggagattggagttagaagtattattaaagttgaatgctgttgttgagttacattattaaaaacagtgaatttaatattgcattacttaatcttttttttttttttttttttgagacggagtcttgctctgttgcccaggctagagtgcagtggcacgatctcagctcactgcaacctctgcctcccaggttcaagcaattctcctgcttcagccgcctgagtagctgcgattgcaggcacctgccatcatgcctggctaattttggtatttttgtggagacggagtttcagcgtgttgcccaggctggtcttgaactccttacctcatgtgatccactcgccttggcctccaagttgctgggattacaggcgtgagccacccagccctgccgcattaatctttaaaaaaaagtagagtctataaattgtcttaaaaacaattttatatcattagcatttaaatagttttaacacattcatatacatctttaatctttaaatcatttaccatccggcttacatttttatgtttttaccaactttcatttttatcatctggcttacatttttacttttactatcagacttagatttcttaaaaaagagagagtttaggagtgagtttttctggatgtgcttagaatttggcagctctggacaatctgcaaacaatcctcgacaggcttctgttttcaaataagctagattgtatcctcctttagtggactctagctgatgcagtcacagtggtgggaactagttcagattcagtttttttcacacttttttttttttcttttgagatggagtctcgctctgtctcccaggctggagtgcagcagtgcgatctcggctcactgcaacctccgcctcctgggttcaagggttcaagtgattctccccgtctcagcctaccaagtagctggagtacaggtgcacgccaccatgcccggccaatttttgtatttttagtagtaactatgggtttcgccatgttggccaggctggtcttgatttcctggcttcaggtgatgcgcctgccttagcttcccaaagttgggattacaggcgtgagccactgcacctggcccacatttgtattaaagtattgttttagaaaagatttgtgtgctgtgtattgtcttttaatgacctggttaaaatacttaattgatagttatctgtacgtgtttaatctttctcaaagatcagtgacccataggtgaagagtgcaaagtttgatttacaattgggttattcgtttattcatattacagatacttcatgaaggaacagcagtagcaacaaaaaccccggactcattcttctgaattaaatgggtgcagattggtctggagactcttctgctgccctctagtgtttatatcatgagtagccattgaaagttggaagctgcacattgctgtgccgctaccactcttaccttagcaatatccttaagcagcatgttgtttatccttatcttaattgctgtgctttgaggttgggaatgctatttgtgggtatctctgggatatcagttaactcaatttctatttttgaattatgtaagatagatgttctaccctcccttacagggtggtggtgctgtgaaagtaagatgactgtacattacaggaaagcttaaaaaaataaaaatgtaaggtgtgtgtgtatctttttttaatctgaatgaaatatgggatttctgtaagtctttggcctggaactgcttctttggggagagttgaaaccgttgtttcaggttattttggattttaatgtgtgagtttctcttttttagggcataataatttatttgagaaaattgcaatgtattgatcatggtgatcagcatgtatgttatggctttcctgttgggtatcaacaatgtgccatttttgtatactgaaatatttcagtaggatcacactctatagaagtaaatgtctcttttcagatggaaatgaagactagttttttgggagttctatctcacagaattaatttaaacttcttatgaatcagaattacagtgaaatgtagttaagaaaaaaggaagttttaaaataagcagcttgaacttgtatttttgtatattttatataatttagtcttcagttttgatacattaaagctgtgtccactctggccaaagcacagccatggaaaacctcagataatgcccatgctgccattcctaaaagtgtggatttcctttacctgtgttttgttacttctttgcttatcccgttcagttcacattgtattactgctttgatttctagttttgtttttccaaatgattgctctttttctgtgaattttcaagggttgttatgtggttgtcatttgctaatgtgatgaacaagtaattcaagcaattatcttttaagatagttatatatttggtcagtttttactattttacgtaattatttaaggggtgagtatttttcatatcatttattcctaaatgtcactgatagcatggttattggaaataagcaaaattaatctcattggtacagattttagggcctatatatgttgcttaaattactttagaaatttttttcttgaaacgaaatgctctgtatataggacataaaccatgaatttgttaattggtttttaaaaaaattaaatttcacttgacaaaaatggcagtcatggaaaataagtagccagctttataagcttctttgccaggtgcagtggctcacacctgtaatcctagcactttgggaggccgaggcgggcagatcacgaggtcaggagattgagaccatcctggctaacatagtaaaaccccgtttctactaaatatacaaaaaattagctgggcgtggtggcaggcacctgtagtcccagctactcgggaggctgaggcaggagaatggtgtgaacccgggaggcggagcttgccgtgagccgagatcgtgctgctggactccatcctgcgtgacagagtgagactctgtctcaaaaaaaaaaaagaaaaaattataaatgtgtattttgacatgtttagttttttatacttatgagaaactcccccttgaaaaagttccattgcctttaaacggtttgaaatgtttgaaagacagaatctaacttcacgttttttcacatacttgacataattatgctaattttgattttttaaatcagaatttttcattaaatatttgtttatttgcaggtatatttgcttacttaaactaccatgttcctcgaacgagacgagaaattcctggagaccctaatcaaaggcctcagagactggagtacagaggannnnnnnnnnnnnnnnnnnnnnnnnnnnnnnnnnnnnnnnnnnnnnnnnnnnnnnnnnnnnnnnnnnnnnnnnnnnnnnnnnnnnnnnnnnnnnnnnnnnnnnnnnnnnnnnnnnnnnnnnnnnnnnnnnnnnnnnnnnnnnnnnnnnnnnnnnnnnnnnnnnnnnnnnnnnnnnnnnnnnnnnnnnnntcttactctaaattcttttttctttcctataactttaatttttatccattgatttcatgctttgacacataaacttgcctcagattcttttttcttatttttattatttatttttgagatagggtctcactctgtcaccccagctggagtgtagtggtgcggtcatagctcactacagtctcgaactctgggctcaggcaatcctccctccgtagcctcctcagtagctaggactatagctgtgtgccaccatgcccagctaatttttaaaaagtttttgtagacacgagagtctcactatgttgcctgggctggtctcaaactcctggcctcaagtgatcctcctgccttggcctttcaaagtgctgggattacaggcaagccactgattccagcctcatctatcttaaataaattacacataaacataactttctggcaactttatgttctaccctagctccttccctcaactatgtcagaggttcctaagaccatcctcagatttgacgattccctaggaggactcacagaactcagcatttggttgtactcatggctatgtttcattataacaaaagaatacaaagcacaatcagcaaagggagaaggtgcaggaattgaagtcttgagaaagctaggcacaagctgctcaccagtggatcagtgcctaaggttttcattgggggttggtcacataggcaccctctgcccagcatgtaccaaaattctagactcccaaaataagagcagatgttcagcataaaccactttgtttgcacagtttgtgtagtgagacacttttggttagggtggtaggaatccttccaaaaaccaagtttctagacaccagtgaagggccaaccttgaaaacaggcctttctgaggatagcagtttcacacctgctgtgttaactcttttttgtacacttaacattgccacatggaatggacatttgtcttccttgactttccttagtaatggaaagtcagttcctcaactcctttgtttttaaaattctctccttccttagcttccttgacagcacatcttattctcttcctaagatgctaagattacttcttttctgtttgctttggaggctcctttcttctacttacagctcaaatattaatgttcttcaagattctttttttttttgaggtgagtcttgctctgtcacccaggctggagtgcaatggtgcgatctcggctgactgttgcaacctctgtcttccggattcagctgattcttctgccttagcctctccagtagctgggataacaggcatgcaccaccacgcctggctaatttttgtatttttagtagagatggggtttcaccatgttgcctaggctggtcttgaactcctgacctcaggagatccacccgccctggcctcccaaagtgctgggattataggcgtgagccactgcacccagccaatattcttttctagatccacttctcttatttggtgtcttcatgggtgagctctgactcatcaatcttcttttttttttttttttttttgagatggagtctcactctgtcacaaggctggagtgcagtggcgtgatcttggctcactgcagcctccacctcccgagttcaagcaattctcctgcctcaccctcctgagtagctgggattacaggtgcctgccaccacacccagctaatttttgtatttttagtagagacggggtttcaccatgttggccaggatggtctcgatctcctgacctcgtgatctgcccgcctcggcctcccaaagtgctgggattacaggcgtgagccgccgtgcctggcccatcagccttctgttaatatatgttggtaacttctttgttttattctttttattttttatttatttttaatttttatttttttgagatggagtcttgctctgtcgcccagcctggagtgcagtggcatgatctcagctcactgcaagctccacctcccgggttcacgccattctcctgcctcagcctcccgagtagctgggacaacaggcacccgccaccacgcccggctaattttttgtatttttagtagagacggggtttcaccatgttagccaggatggtctcgatctcctgacctcgtgatctgcccgcctcaccctcccaaaatgctgggattacagacatgagccaccgcgcccggccagtattttttatttttaattttaatttttttgtgtgagagtatgttggtgacttctaatccagatgtatttcttttaatccagatttatctcccaagctgtattctaggcctcctacaagtttcttcctagatagaccatgatattttaaactttgcatgttcaaaaattgaactgaggccgggcgtggtgactcacgcctgtaatcccagcactttgggaggctgaggtggatggatcacttgaggtaaggagttcaagaccagcctaaccaacatggtgaaaccccatctctacttaaaaaaaaaaaaaaattagccacgcattgtggtgtgcacctgtgatcccagctattttgggaggctgaggcaggagaattgctgaacctgggaggcagaggttgcagggagctgagattgcgccactgccctccatcctgggcgacagagcaagaacctgtctcaaaaaaaaaaaaaaaaaagaaaagaaaagaaaaataagctgaatacattgcagtcctcaccctgctccccaccctgttttttgtttgtttgtttttgagatgaatctcactctgtcgcccaggctggaatgcagtggtgtgatctcagctcactgcaacctccacctctcgggttcaagccattctcctgcctcagcctcccaagtagctgggattacaggcatgcccactctgtttttctatgtcccttttattgagaatcattcaacaagtccttcaagccattcaacaagtcctttgaggtattccacacttctcctgctttctcacttacattcagtcagttccacttttcaatatcatttatttctgtctgcattaccactgtttagttcaggtcctcttcatttttgctttgctgtagctgtagcttttgacagctggtttcttccttccgtttctctccctccagttctttccctacacttgtttctagaagggctttgctaaacatttttgccgaatcacttctctgcttaaaggacagtgttttcccagtatcttcagggtagctttttcaaattccttagcaacttaaggagactcttaagagatgtattctgtgaccttctttccttagctaccttctgaggtgggtgcccatcttttgcatttctccattgtatcccaattgtaacctgtagtatttttattataattcataatcacgctgaattattttttccttgtctgtcttctcgatagacttagaaatttgaggacaggaatggagttatttttgtttttgtgtctagcagctatcctggttcttgacacacaataggttttcagtaggtaattgaattaatacattagtgaattaattagatgagaatgtattttttaattaaaaattttgcctcacattaataattttatcagtagccagtttctaaattttgcttttttacctcatgatggtttaggtgtgggatttgatggaggcaatgataaagattgggaagccaatgcctgcaaaatccagcttattaagaagaaaggaaaagttaaggcactggatgaagaagttcacagtaacgtacttaatttgatttttgtcccctttccccttctcttccttttcccctccccattctcctctaagttactccctccccccatattttgggaccaattttaatgataatggtctgtaacattgaagggaggaaagaaaagtagttttgttactgtctggactagttttaaaatgtacctgagcctgaaaaataatcattgcaactagggaaggaaattagttaggtatattaccttcagtgtaagctctgaatattaaatgaagtatcttcagagccaccattcctgaggaagagcttttcataagacaaaaggtatttttagtgatgcccttttacacatgtcttcacttgctaattgtcttcactttggattaaatgcctagcttggatgtagtcaattttgacattgcacctttgaataggtctgatataatctggtaagtatcatgttttccctcacagttttcttctctggcacaaggagttgtcagagatgtatgccccatcaaagaggatttacttctcagtatttagatcataacattattcttacacattttatttttttcacaagaaacttgaaaacaaagcaaactttgaagtagattgattgaaaaaatatttttaaaattctccacaaaacccaggaaaccgcaagtattttatgtacctactcatatgaatgccatcataatcattgtaaaagagtacaggtagaggaaaatgatggattttgtcttttttttttcccacataagccatacgtttagctctgtagtacttgtttaacgaattaaatcaatacttattttgcctgtattgtagtgtaagattagctaggggtaaagcagacacccaaataactatacttcaaaaacagtagtataaatatctactatgtgttctgcatcctgtataccaggctgattgtagcaggttctgtaggagagaacagacattgctgtgagattcaggggagagttcccacaagttgacgagactgggaatacatagggaatgggtgctgattatatttggtcagtgaagatgtgaagggaggaccttctgagtagatagcatagcaagataagaagagtaatggcaggcgtgttgatggaatgatagtagtcctttttatttacagtattggtagacaaataagggaggctagaaaggcagattgtgaacagaatcaccatttttcaatgtcagcatattgaaacatgcctcttcgtggtcaacttttttttttttttcttcccttcccagatggagtctcgctgtaacgcccaggctggagtgcaatggtgcaatcttggttcactgcaacttctgcctcccagattcaagcgattctcctgtttcagactcccgagtggctgggattaccaggcgtgtgccatcatgcccggctaatttttgtatttttggtagagatggggtttcaccatattggccaggctggtcttgaactcctgacctcaagtgattcgcctgcctcggcctctcaaagtagtgggattacaggcattagccactgagcctggccaactggtttgtttttgaagtgtagttatctgagtgtctactttactcacagctaatttttttttaagatggactcttggtctgttgcacaggctggagtgtagtgacacaatctcggttcactgcaacctctgcttcctggttcacgccattctcctgcctcagcctcctgagtagctgggaccacaggcgcccgccacaacgcctggctaattatttcgtatttttagtagagatggggtttcaccatgttagccaggatagtctcgatctcctgacctcgtgatctgcccgccttggcctcccaagtgctgggattgcaggcgtgagccaccacaccttgctaatttttgtatttttagtagagacggggttttgccatgttggccaggctggtcttgaannnnnnnnnnnnnnnnnnnnnnnnnnnnnnnnnnnnnnnnnnnnnnnnnnnnnnnnnnnnnnnnnnnnnnnnnnnnnnnnnnnnnnnnnnnnnnnnnnnnnnnnnnnnnnnnnnnnnnnnnnnnnnnnnnnnnnnnnnnnnnnnnnnnnnnnnnnnnnnnnnnnnnnnnnnnnnnnnnnnnnnnnnnnnnnnnnnnnnnnnnnnnnnnnnnnnnnnnnnnnnnnnnnnnnnnnnnnnnnnnnnnnnnnnnnnnnnnnnnnnnnnnnnnnnnnnnnnnnnnnnnnnnnnnnnnnnnnnnnnnnnnnnnnnnnnnnnnnnnnnnnnnnnnnnnnnnnnnnnnnnnnnnnnnnnnnaacagcctaaatgtctataagtaagggaatgggatgatataataagttgtgtgtgccgggcgtggtggctcacgcttgtaatcctggcactttgggaggccgaggtgggcggattgcctgagctctggtgtttgagaccagcctgggcaacatggtgaaaccccatctctactaaaatacaaaaaattagccgggtgtggcggcgtgcacctgtagttccagctattcgggaggctgaggcaggagaatcacttgaatccaggaggcggaggttgcagtgagctgagatcgtgccactgcactccagcctgggtgacagagtgagactccgtctccacaaaacaacaacaacaacaacaacaacaacaaaaaataagttgtatatgatagtgaatgagcatatgtagcttttgaaagaagtgtactgaatctggttctgcatatgggaacatggataattcctggtatgtaaagtataggacatttaaaaacacaaaacggtactatcatttatggtctcatgttaacataatcatagtttaaaaggcatgaatagtaagactgtgtcaacttgaaaatcttctgaggagtaagtgaatgggatggggatataaaggaggttatcaactgcattttttacatttatttatttcaagtttccatataccacactgattttttacattttagatcttaaaaaatatgtaaagcacagatgactagatgttttgttaactctgagtatgggtagttgggtgttcattattcccagcaaatttaaatatgtttgaagtattttttttgaaaagggaagatgacatctgagaaaaggcaggcagagggcaaggagccatgggagtagaggtagggtaagatagaagatgcaaatgaggaaattattgaagcactacggcccaagaagatcaaggcacaggcaaggagttagcctttaaaggaaaaagtgtactttaggaatcaaagatgaaagacaaacttaaagcagataattaccaggtgagaggacaaaagctgagtaaagtggaaattgagggattgcaggtaggattgagctttatggagaatagaaaagatatgatgaactgtcagggaactggattgagctatcagtttaatgaataaggaacttggatacatgtttcttaggtagcaacagtgaaatagatatgtgaatttgaaagggtcttaatttacagaattttctgactttcttcagtattgcttggcagtagatgggagaagagaaaccgagtgtgggggttaatctagacttaagattcagcaaagggctttaaaatgggtaacagacaataaggaagcgtcaaggattcaaagtcatgattaatttatatgacaggaaatatttattatgagaaatgtgcttattgtcatagcaataattttttcttactagacattcggtaatgttcctacagcaacagtgaaataaaggtgtggtaattatcatgaatttgaaatggattcaatatatagaatcttgtgactttctccagtattgcctgccagcatgtgcaaggagatactgctttaattatagttagcttaaaaaagttgtcaaagaggccaggcgtggtggctcacgcctgtaatcccagcactttgggaggttgaggtgggcggatcacctgaggtcaggagttcgagaccagcctggccaacatggtgaaaccctgtctgtactaaaaatacaaaaaattagccaggcgtggtggtgcgtgcctgtaatcccagctactcaggaggctgagataggagaatcgcttgaacccgggagggagaggttgcagtgagccaagattgcgccattgtacttactccagcttgggcacaagagcaaaactccgtttcaaaaaaaaaataaaaaaagtagtcaaagatgttttcatttcttgcattggcctgttgaataatggtaaatggtatttttcttgaggtcatttatcaggttgccttaattacttagaacacagttaagccaggaaagaatagatgcctgagtttattcattgatagattgagccatccaacaaaaaggtatctgccatgtataccttttagtgcttaggattcaaaaataataaggtaggctgctgtttttgtagaactcaaattctggtggaagctaggttgacaacatataaatgttatagtacaatagaatataccattgtggttttatttatttatttatttacttatttttgagacggagtcttgctctttcgcccaggctggagggcagtggcatgatctcagctcactgcagcttccccttcctgggttcaattgattctcctacctcagcctcctgagtagctgggattacaggcgtgtgctaccacgcccagctaattttttcagtagagacagggtttcaccatgttggccaggctggtcttaaactcctgacctctggtgatccacctgcctcagcctcccaaaggtgctgggattacaggcatgagccgtggtgctcggccagtttgctcttaatttagacctaactctgataaactttgttatctgggttcttagccaaattaattttatatttaggaaattaagagcattactagttaataactggagctgtccatttttttaagaaaccccaagaaaagatagcttatatgaaaaataagaatcagctacttcctttttttttttttttttttttttttgagagggagtctcgctctgtcacccaggctggagtgcagtgatgtgatctcagctcactgtaacctctacctcctgggttcaagcgattctcctgcctcaacctcccgagtagctgggattacaggcgcgcaccaccacacccggctaatttttgtagttttagtagagacagggtttcaccatgttggtaaggctggtcttggactcctgaccttgtgtcccacccgcctctgcctcccgaagtgctgggattacaggcatgagccaccacatctggacaaatcagctacttttcaagataaaggaacattggcctatgccgatttcccagtagccccatactttcatagcattgctcggttcttaaatacctatttgattttggaggcactccatagttgcagtttctattgtgagacgtgtgtacactcaccagagaccaaagaaattgcagtcataaggttgtgtgtcattgggaaaatgaatttatttttacatgtttaattaaattgataatgactttttaaggcaagaattaaatatagatttaaaagattacattaattgtttttgtccttaactcttgagtatttgtatctccaggaaacttgaaagaatagtacattattacctatatatacttcacctaactttatctgttattaaaattttgtcatgtttgctttaactctgtattagttttttggttgttattgaaaccatttgccttcaatatttcagttgcataaactcctaaatctttatttatctttatttttaatttttgtgggtatatagtaggtgtgtaaacttactgggtacatgagatgtcttgatacagacgtacaatgtgttcctaagtcttttttttttttttttgagatggagtctcgctctgttgcccaggctggagtgcagtggcatgatctcagctcactgcaacctctgcctcctgggttcaagcgaatatcctgcctctgcctccggagtagccaggactacaggcgcgtgccaccatgcctggccaatttttgtatttttagtagagatggggtttccccatgttggccagactggtcttgaactcctgacctcaggtgatccacctgcctcggcctcccacagtgctgggattacgggcgtgagccactgcaccctgcctcctaagtcttttaatcactattttgaatatgcctgatctttagtttcagtgattgtatattccaagagagcagcattgtaataattgtatttaaatatagcttatagcattatctctgcagcatgatttaatattgaaatttttcttttcatattcttcagagcaacaagatatggatttggatatagaatttgatgtacaccttggaatagctcatacccgttgggcaacacatggagaacccagtcctgtcaatagccacccccagcgctctgataaaaataatggtatggaaagattttttgtgctttggaatgattgtggaaacctaataatgggggcagaatgaaggcttttagattttcattattttaataatttttcatctggaaaatttcaaacattcagaagtagtagagagcatatggagctgagagtgctggctcatgcctgtaatcccagcactttgggagcctgagttgggaggattgcttgagtccaggagttcacgatcagccgtggcaacatagtgagaccctgtctctacaaaaaataaaaaaataagttaggcattgtggtgcatgcttgtagtctcagctactcgggagactgaggtgggaggatcgtttaagcccaggaggtagaggctgcagtgagccgtggtcacacctcatgccattgccctccaacctggacaacagaatgagaccctgtctgtccaccatgcctggctaatttttgtatttttagtagagacggggtttcactgtgttgaccaggctggtcttgaactcctgacctcaagtgatcctcccgtctcggcctcccaaagtgctgggattataggcatgaaccactgctcctggctgagaacttttgttattggttttgtccttagggcatatctctctagaaatgtataatcaaattactgtgttttagagttacttggaatagtctttctccatgcagttgtgctacgtgttactttaatatgttttagaaacattttttttatttttattattattttttgagaccaagtctcgctgtgtcgcccaggctggagtgcagtggtgcgatatcggctcactgcaacctccaccttccaggttcaagcaattctcctgcctcagcctcccaagtagctgggactacaggtgtgtgccactacacccgggtaattttttgtatttttagtagagacggcatttcactgtattagccaggatggtctcgatctcctgaccttgtgatccgcccacctcagcctcctaaagtgctgggattacaggagtgagccactgtacctgtcctattttttatttttaaggattgatattctttaaaaataaatgttatttataattatttaaaatatttacataattccgaagtcacatctttaaaataagacacactaaaagaagtctacccagcactttgggaggctgagatggagggattgcctgagcccaggagtttgagaccagcctgagcaacatggcaaaatcctgtgcctacagaaaatacaaaaattagcttgatggtggcatgcgcccatagtcccagctactcaggaggctaaggcaggaggatcacctgaacctgggggttgaggctgcagtgagccatgattgccccattgcacttcagcctgggtgacagagtgagactgtctcaacaaaacaagtctagactcttctgtttcctcttattcccctcgtaggtaacattcaccaattattgagtctgttctttcatttaaaaaaaataagcaaatacatacagaatacatacaaaagtgtgtatgtgtgtatttatccctccccattttttttccttttattttagagacagggtctcactcctccacccaggctgggtacagtggtgggatcatagctcactgtaacctcaaattcttgggcacaagtgatcttcctgcctcagcctcctgagtagctaggatcacaggcttgcaccaccacacccagctaatttattttatttttgtagagataggggtcttgctttgttgctcaggctggttacaaatttctggactcaagtaatcttcccacctcagcctcccaaagtgctgagattacaggcatgaaccactgcacccagcccttgctgatttttagtttaattcagaagctgcctatttaggcttcttgtgcttcaatacttactgttgaatttgatcataatgctagcaataatttagacttttgacactgacaaggcctttatgaaagattcccgaaaacttacatctagattatgttttgagaatttggctttaagttaagacctttaaattagctgtttattaatctctttgttctagcatgaagtttttttttttttttttttttgagaaggaatctcgctctttctccaaggctggagtgcaatggcatgctttccgctcactgcaacctctgcctcctggattcagcgattcttctgcctcaagcctcccaagtagctggaattacaggcgcctgacaccacgcctggcaattttttgtatttttagtagagacaaggtttcaccatgttggctaggctggtctcgaactcctgagctcaggtgatccatctatctcagccccccagaatgctgggattacaggcatgagccaccgcacccggcaagtttttttataaatttatttttgtggttgctatcatctctaaaaaatctagtgaaaatgtttattatttggtttctaattactgtcagccaaaatatcagatctttatgtatattaagaacattgnnnnnnnnnnnnnnnnnnnnatgtatattaagaacattgttgggggccgggtgtggtgactcatgcctgtaatcctagcactttgggaggccaaggcaggtggatcacctgaaattaggagttggagaccagcctgaccaatatggcaaaaccccgtctctattaaaaatacaaaaattagctgggtatggtggcatgcacctgtaatcccagctacttgagaggctgagccaggagaatcgctggaacccaagaggtggaggttgcagtgagccgagatcgtgccacttcactccagtctgggtgacagagcaagactttgtctcagaaaaggaaaaagaacattttggcctggcatagtggctcatgtctgtaatctcaagacactggaaggatgaagtgggaggattgcttcagctcaggagactagcctgggcaacatagcgagactctctctacagaaaaataaaaaaattagttgagtgtggtgtaagcagctgtaatcccagctgcttggaaggctgatgtggaagaatcacctgagcccaggagtttaaggctgcagtgagtcatgattgagccactgtactccagcttggtgacagagcaacatcgtgtctccaaaaaaaaaaaaaatattttgataatttcatataaaatttaatttagcagtaatttttctcctaactgaaatgaactctgaataataaatccaggattggtaggatttttttttttttttttttttttgagacagaatctcactctgttgcccaggctggaatgcagtggtgggatctcggctcactgcaacctctgcctcccagattcaagcgattctcctgcctcagcctcccaagtagctgggtttacaggcacgtgccaccacgcctggctaatgttttgtatttttagtagagacagggtttcgccatgttgaacaggatggtctcaaactcctgacctcaggtggtctgcccatctcgacctcttaaagtgctgggattacaggcatgagccaccgtgctcagccggattggtagtttttatgtaccagcagtcgctacaaataatgatattgtcaactcttgattatctgttcttacagttttcaaaattagttaaaaaagatgaaaattatcccgagatcatgtctattttctcttggaatgatattttaacatttatgtttctgacattctatgacttatttggatctcaaacaagtaaatttaactatggaactgattggtttttcttagcaaattccttagttctagttcttaaattcatttagtgtaaatcagattattgttttagtttgaaaggacttctctttaaacttttactcaagaatgaatgaacagagaaataagaagaatatttagttcagctctctcattttgcaaatgaggcaacagacccaataaacttgctcctttcacatgggtaacatttgattactagtttagccacaactgaaattgttatctctagacttcctgtttatttccctactgtacccacctcccctgcactgtttgcttcagctatgccacataaacaatgctgctgatctacctgatgataatctggtaaatgagaagtagatgtaattatgttataaataacataaatagtatatagcatgttaaaaatttttgacttgagaaaaatccagttagagtaatagctattttagatttatcatacttctaacttttttgtcttcaacacttttacctcttttagaatttatcgttattcacaatggaatcatcaccaactacaaagacttgaaaaagtttttggtaagtaaggtgacctcaaaagaccccagtctttgagaatacttctaacgagagcactggggtcggttgttgggatgtgcaacaaacaccatatgtgtgtcatcaattaatttcttggacaattccaagggcacggtggtttattggatttttctttgctaacagtggaacaattgtgttttttaatatgaaaaggaaatgattagcatttgactgtaatatacatgacaaaaggctcaaataaaattggaattttgtggagacattttttgcattctgagagattgtcatgctttaaagttcctaggatatattaatacaagaagaatcaggacaaattaaatgaaagttttatgtcgtaaatagctatatactgtatagtagtggtcatagtgctgacctgcatgagtgctttcttagggctgttcaattgaactttctccagtgttggaagacagtgtatctgggctattcagtatagtagccactgtccacatgtggttgttgagctagtatgactgaggaactgaattttaaattttatttaattttaattaaattgaaatagccacatacagctaatggctatttattagacagtaagttaagtgtatgttcagttaaacagagtcccacactgttttagagtcactgatcagctggtgactttaattttgaataatgggatatggtgttcaaagaatattagaaattagtggcattttgacggaacaattctgtagaaaaggtttttttatcattaatatttctttaattgtatcttttttttctttctacttacaggaaagcaaaggctatgacttcgaatctgaaacagacacagagacaattgccaagctcgttaagtatatgtatgacaatcgggaaagtcaagataccagctttactaccttggtggagagagttatccaacaattggtattaagccacatttttaaagataattatgccaacattaatgctgagaaactttctggaaattaagtttgataagcaggaactgtgctatttttttatttttggcttttatttctcatataactattcaagttgaataattttgagaaactgattgatttattgattcccccccaccctccatttaaaattctacttacttcattcaggtttaatgtcatgaaaatgaaaattaatccaaaatcagtgtgtctaaaaactatgcatatatgcacacatccatatgcaccacacgtggacatgtacacagtacacacgatggaggattagttattcccttgcttcttgctcatccgagtgttcttctcaaccaataacttagcacaatagtagcttcacagctaccacagtttattttctgggataatgcctgcttgtctctgagccaacaaagtcaactacttatttttccttttggggactttcccttggctctgaacttctatagaaaagcatttccaagcccatgagaaaatcagtattctttttgattccatccaacattcctaattaaagattaaagacatcaaagatctacaaatgtccaaatccatagtgatacctacatttcccttccccactcataactctagctttcccacttaaaagtcctttacttcccaaatacggtccagccctcacttctctcccacctgcacccaaatcttatatctgtagcaaaaagaggaagcaggaagatggagaatgtagaggcctattccttccctttccccaaggcagagtggagtagtgtgccttcccagccttttctcgtttctaacaggctttgccttttattcattgtataatccagtttgtgttccaaggtggttcttccctctcctacttcatgttcctcttttatctgttcttgattcctgtaagctctgtccctgaggattcgggttgatggagttgtatggtgtgcatgttaataattgtatatatttatatctctaatatcaaggtcagaaagagtggaagttaacagtggtgtacaattactagggcagagaataggttttggattttgatcttaggatcttttctaattctgtcgttcctctgataattcatagtattatgacgatatagataggtagatgatggagataggatatataggttcagaagtgttcatagcctgtagaaaggatgactttttaaatgatctatttttgtagttgttatctattgagcatattttgggtgtaggcttggttaaaaaagtgggtcttggctgcgcgtggtggctcacgcctgtaatcccagcactttgggaggccgaggtgggcagatcacgaggtcaagagatggagaccatcctggccaacatggtgaaaccctgtctctattaaaaatacaaaaattagcgtgggggtgcgtgcctgtaatcccagctactcgggaggctgaggcaggagaatcacttgaaccagggagttgggggttgcagtgagccgagatcgtgccactgcaccccagcctggtcacagagtgagactccatctcaaaaaaaaaaaaaaatgtgggtcttggatacaccaaagcttaggagtaagtgtttacttaaactttagacttgtttataaactggtacaaaagagcatttgtgtgaacaaaaaatttctgcgctgaagccagtatgttctaggcatttctgacttgataattgattaaatagtgctaatggatttttttccctccctaggaaggtgcttttgcacttgtgtttaaaagtgttcattttcccgggcaagcagttggcacaaggtacatataactctaacaatgactaatgtatttcaacatatttgagttacatgtttattcttcgtagactatacatgaccctttattataaaggctctgccctttattagatatattcatgtgagcatattttcacatcttccttcttgtctgttgcttaccactcttccatttaacagaatccctgaagaaagcaaatacaggccgggcgctgtggctcacacctgtaatcctagcattttgggaggtcgaggcaggcggatcatctgaggtcaggagtttgagaccagccaggccaacatggcgaaaccccgtctctactaaatatagaaaaattagccgggtgtggtagcacatgcctgtaatcccagctactcgggaggctgaggcaaggagaaccgcttgaacccaggaggcaagaggtttcagtgagccgagatcgtgccactgcactccagcctggcctacagagcgagactctgtctgaaaaaaaaaaaaaaaaaaaaaaaaaagaaagcaaatatattttggcatttaattggccttttgtctttgttgggcgcaccaaggttactttgtgaatttggatattgaatattatctaataaagttaaaatattagctttttctgtattttttgaaacatatattctagacagattcctagataattgtaccatcactacttcttgctaggatatttaggcctgatcatgaagtcctaagtgaggcgccctaagatattatggtaagagagatatttttaatctgaaaacagggtgactaaggagaaggtgctacactttcatatattggcattctgtgcacaattgaaaggaaggttccctttaacattacaaaggaaaaaaattaaaatacattgttacagaacaggtgttggcaagttttctggagtgggccggatagtaactattttaggctttctggaccatgtagcctctgtagcaactactcaactttgcagttgtagtgtgaaagcagctgcagaaaataagtaaaagaatgggcatgggtatgttccaaaataactgtatttaatacaatttttatttgtcaattaagaaaaataattaaaaaaaaaccaaaaacctgtattaggctgggcgtggtgactcatgcctgtaatcccagcactttgggaggctgagatgggtggattgcttgaccccaggagttccagatcagcctaggcaacatgacaaaatcccatctctataaaaaataaaaaatttagctgggtgtggtggtgcatgcctgtagtcccagctactcaggaggctgaggcaaggggatcacttgaggccaggaggtcaaggctgcagtgagctgtgattgcgccactgcactctagcctgggagacagagcaaggctgttgtcaaaaaacaaacaaataaacaaaaaccgtttatttataaaaataaaccctggggctgcaggtcagtttgctgacccctgatagagaatattttggatataggatcttgttctgtcatccaggctggagtgcagtggcgcgatcttggctcactccaaccttcacctcccagactcaggcaatcctcctaactcagccttccgagtagctgagactgtaggcacgtgccatcacacctggctaattaggagacggggttttgccatgtttcccagagtggtcttgaactcgtgggctcaagtgatctgcctgcctaggcctcctgaagtgctgggattacgggtgtgagccattgcacctggcccaatactgatttttttaaaaaattctttttatctagttcttatatctgaagttgagcttggggaggatgatttaaacatttgaagagtattggcccattaaattttatgtcattagtccattatttataaaaatggtttaattctaactgcttttgcaatttacaggcgaggtagccctctgttgattggtgtacggagtgaacataaactttctactgatcacattcctatactctacagaacaggtaaaattacctctacaaatgcagtgcagtagatatgaagaattattttccttaagttggaatagatggctctttggtcagatgcacatgtatatatagttctgtctagacatgaaaaagatttgtttttgtgagttctctgatgattagaatttttttctgttgtgtatccttagctaggactcagattggatcaaaattcacacggtggggatcacagggagaaagaggtgggaaatgcactctgcatggatggggaggatcttatcctcttttgtttattctttactaattcttttgttcttggagtgaatgaatgtgctgggcctctaaaaatgtgcttattttgtggggaagcatattttgacatttttctaatttgcggagtatattttgcgtgtctgcttttggcatttagaaagtgcttttaataatttcattaaaatttctgaaatttgagaaaatagttgaaattgtaaattattttttcctttgttttaaaatcatgtaggatgtatgcttagattaggaaaagagcattgtgtgctaggttattatagattgactaagtgggtagttatttgaatcatttaggctaacttttaactgaaatatgtttaagtggtctttattttttatacatgacatattgttggatttacatttgctatcttgattggctttatttgaatttgtagtgattgttcttttatattgtttatgtgtaaagtttattttttgtttttcttatttatttacttcgatgtaacttttttatagagcggcagggggagacagggtcttgctctgttgcccaggctggagtgcagtgcagtggtatggtcatacctcactgcaatttcgaactcttgggctcaggtggatcctcttgcctcagcctctcaaatagctagtactacaagcgtgtgccatcatacccagctaattcttatttttagccagggttttgctctctcagccaggctggagtgcagtggtttcgtcatggctcacttcagccttggctgcctaggctcaagtgattctcccacctcagcctcttgagtagctgggaccacaggcatgtgccaccacccccagccaatttttttatttgtaaaaaggaagtcttgctatgttggccaggctggtctcaaactcttgggcttaagggatcctcccacctcaacctcctaaattacagggattacaggaatgagccactgtgcctggctcccagctaactttaaattttttgtacaaatggagtcttgctatattgcccaggctgttcttgaactcctggagtcaagtgatccacctgcctcagcctcccaaagtgctgagatcacaggtgtgagccactgtgcccagcccagaagtgttcttttcatttaaacagacattgatatctcaaattttttttaccttatttatttattttttgaaacagtcttgttctgttgcccaggctggagtgcagtgacatgatcttggctcactgcaacctctgcctcccgggttcaagcgagtctcatgcctcagcctccagagtagctgggactaccagtgcacaccaccacacccggctaacttttgtatttttagtagagacggggtttcgccattttggccgggctaatctcgaactcctgacctcaggtgatccgcccacctcggcctcccaaagtgctgggattacaggtgtgagccgctgcacccagcctcaaattttttttacatattttaactaaatatactttgttatttgaagaatgaaattatcaatatttggagaaaaaacacagtgaaactcaagcctattaggacattttataagcaaaagtagttgtttttttttttttttttttttttttgagacgaagtctcgctctgttgctcaggctgtagtgcagtggcgtgatctcggctcactgcaacctcggcctcccgggttcaagcgagtgtcttgcctcagcctcctgagtagctgggattacaggcacgtgccaccacacccagcaaatttttctatttttagtagagacggggtttcaggctgttgctcaggctggtctcaaactcctgacctcatgatccgcccacctcggcctcccaaagtgctgggattacaggcctgagccaccacacctggttgcatttatttttttaaaatgctgagctctctttttatgtgtttttaaattcacttttttgttttgtttttgagacaaagtcatgctctgtcacccaggctggagtgcaatggcacaatctcacctcactgcaacctccacctcccaggttcaagcgattctcccacctcagcctccggaatagctgagactacaggtgtactctaccactctcagctaattttttgtgtttttagtagagacgaggtttcaccatgttggccaggctggtcttgaactcctgacctcaagtgatctgcccacctcggcctcccaaagtgctgggattaaaagcatgagccactgtgcctggtctctgttttttaacatacagtaatatttactctttttcatgtagtttcaccaattttgtcagatgcgaaattgcataagtaccaccataatcaagatacagaacaatttcatcactcaataaggtccctcaacctgccctctgtcatcaacccttgtctcattcccagcccctggcaaacactaatatgatatttttctataatgttactttttcttggatgtcatcttacatttatttttcagtttggcatctttgctgttaaatatgaatgggaaaagttactttgttttcatcactaaaacatcaaataatcacagatggtggaaaacttcgaatatactttttttggcttttatttttaatagatatataattatatgtttatgtggtgtatatttcaatacatgtgtacaatgtataatgatcagctcaggataaatagcacatttgaatgcacatttctgataattatcaagtctgcctttatatgtgcattttaagaggatagatgaaatagcagtttttataagtatacttgtgatgttctctggctattgtgtccatagttctaagttctgttatgtcctggccttgaagaaaggtgcatttttgtctctaggacatttatgtagtcttcaactaatagatttttttcctatataaggccaatttataaaaccttagcattccagttttgatgaaaaagttaatattaatgtcttgacaaattaagtagaggtgtcataattctgaaatacaagaattaaaaggatattagctttgcaaaaagaccctactttatcctgacttaaaggaagagtaagaaaacccaagttgaagaaaggagagtttcttggtttataaattttgtctctaacagtgggtgccacatatgatataccgtgattagagagtgatatgcatctgttttgttttcaaatcagaattagtgtagactacaacttgatttgttatgctgacttgctgctaaaatctagtgaggttttgttatgatacaataaaaattaatttgccactagccttcattttctttttcttttttttttttttttgagacagagtttttgctctgttgcccaggctggagtacaatggcgtgtgatttcggctcactgcagcctccacttcctgggttcaagtgattctcctgcctaagcctcccaagtagctgggattataggcgtctgccaccacgtctggccaatttttgtattttcagtagagatggggtttcgccatgttgaccaggctggtcttgaactcctgacctcaagtgattcacctgcctcggccttccaaagtgctaggattacaggcgtgagcccctgtgttcattttatttttcgttgcacaattttgatattttaaatgtaattttgttataattataggtacacaaacttttatgtgttaagatcattgttttgtataaagttaaaattaatttatacatacttttgatttaaaaaaccggttaatattaaggaattacttgtcttttacctggaaaataaatattatattaaaaaaacatataatgtagcacttttacctgccacgcactctttgatagttgctacttcactgtacactttttgtctgttcttattggcttattgcatggaaataaggtgatctacttggctttttaaatttgctaaaattgttttgtgttgctatgattttttcttgattttatagaatattatgcatatttctacattggacatgattttctacatgtttgccaattcatgttaactatatgctttaggcaaagacaagaaaggaagctgcaatctctctcgtgtggacagcacaacctgccttttcccggtggaagaaaaagcagtggagtattactttgcttctgatgcaaggtgagcttccttagttgattcaaagagatttttagtaaaacttctcattctgcaggaaacccaagaagtcattgtgtatcagtctagttgtgctctgtgagataactttttaaattaaagaaatacaggtgaccattttggagatggggctgtaaggacactttttctgtcatttcaaagtatgtgggtcagtttactaagaacacatatactgcttgagacttgttccagtgtatttattttagagctcttacatttttttccttcttatttcaggagccttatccaggttttgaagggaggagattctagattgaagagtaaaatggcttagttagtatcccaatagttatagcatagttgctaaactattgtagttttagtctaatgtagatactcatcttttacatttagaattaatttgcagcataatcatttttataaagggatagtagtagactaagatattttgagagaaaatgcagggggatgtttacatgcatttgtaaatgaaatagtaatgaggataaaataaaatcaccgaaattgcaaacaagtatttgagtcatccactgtacctgaaaataagagaaaataataaaaataagaaaataatgccatttaggacatcagggaatatattatctcagtgggaaaacaagctttactctttaatgtttttacaggtgtgtaaggtgtgtagtcagggctaagatgtgtaagattacacagttgacagttatggcttaaatacactggaattacagaaacatatcagccttttctcattcatttatacattcatattgaacactgggtgaagtcatatgctagcgtcaggagataatggtgagtaaaaataaaaatattacttttccttaggagctcttccatagtgaggaggcaaattttaaacaatgatcacagaagtgtagaattccagctgtgacaagagctgcagaatgctagtaacagagtgatttacccttggtgggtaaatttctttaagggaatgatgtttgaactgagagttaaggagagattaggagttaattaggttaacaggtagagggaggaacattcattctttgcaaatggctcagcctgtgagagtttaggatggctttgagtgtggccagaatagagagagtgagaggaagcttggggggagatgaagctggagaaggaggtatagggattacggtaaggcactttgttgtctctctgagagccaaagggaaactgtcaaatggtttgttgagtgaaggagaaatctttattagagttgttgccttttgatatcaattttggcagaaatggaggatggacggagagagatcagagagaaagtgggtggactaattgggagatcgctgcagtagtccacccgaggagctgatgggagcttgaatttgtctggtggtggacatagaaactaagaatatttggaagttaaaatttcaggacttggtaatggatagaatgaggaggaaacaaccatgctttctgatctaatctgtttggtttagattgctatgcagagttccttttattttttgtccacaatgaccaccttccccatactttcctgtaggggttggcattagtaaccagaaaattctctgagatactgcagagtgatagagtttatattgaaatttggttcttgtatccaaatgatagtttcatttgtaataatgatccttggttatcgattgtaatatctccttgaaaactttatagtgctgtcatagaacacaccaatcgcgtcatctttctggaagatgatgatgttgcagcagtagtggatggacgtctttctatccatcgaattaaacgaactgcaggagatcaccccggacgagctgtgcaaacactccagatggaactccagcagatcatgaagggtgaaagtttttgtcatgttatagcttgctgtccttactggaaagaatatattctacttcctttcctagcatattaaatctagtaatgaatgatgagtggaatcttccacatgattagtgaagggacaacgctaggaaaagggatgattctttagagaaattatctgctgtttttacaatcgtcttcaaactaattaatgatttgttatttgtaacattataaaaaggttattaacacttgatactttaaagatactttataaacataaaaatagttaatgttctgttcctttttattctctttgtgctttagttttcttatatataacatgaggataatatagcctgcctcattaaggttgttttgaggattaagaagctactatatggctgggtgcggtggctcacacctgtaatcttagcactttgggaggccgaggtgggcagatcacctaaggtggggagtttgagaccagtctggccttgccaacgtggagaaaccccgactgtactaaaaaatacaaaattagctgggtgtggtggcgcatgcctgtaatcccagctactcgggaggctgaggcaggagaatggcttgaacccgggaggcagaggtttcagtgagccgagattgcgccattgcactccagccttggcaacaagagcaaaactctgtctcaaaaaaaaaaaaaagaagcttaaaacagtgtctgacacacttagtcgtatgtaatatttgcttctgttaactattataattattatgatttggattattttattcctttctgatgggattgtggtaggaataaaaactaacattggccaggcacggtggctcatgcctgtaatctcaacacttagggaggccaaggtaggaggatcacttgagctcaggagtttgagaccagcctgggcaacatagtgagaccttatctctactacaaactaaaaaaaaaaaaagtccaggtgcactggctcacacctgtaatcctagcactttgggaggctgaagcaggcagattgccagagctcaggagttcaagaccagcctcagcaacatagcaaaaccctgtttctactaaaaatacaaagaaaattatgggcatggtggcatgtacctgtagtctcagtgactggggaggctgaggtgggagaatcacttgaacccaggaggcagaggttgcagtgaggtgagatcgtgccgctgcactccagcctgggcgacagagtgagactctgtctcaaacaaaacaaaacaaaacaaaacaaaactatgagccgggcatggtagtgtgtgcctgtagtctcagctactcaggtggctgaggtgtgagaattgcttgagcccaggagattgaggctgcagtgagcggtgatcttgcggtgatcacttcagtctgggtgacaaagaccctgtctcaaaaaaaaaagtaaaaataagaaataacatttattgcataactctatatatatatatgtcagattttttgctttattaatccatactacaatccatactgtgaagtaattggtctcttattttatagattaataatttccccagtttagatagtaaaggatagaactacagtttgggtgggttgcactccaaaacttaaagcttgtcccagttgactgagtgcggtggctcacgcctgtaatcccagcactttgggaggccgaggtggttggatcatgaggtcaggagttcgagaccagcctggtcagtatggtgaaaccttgtctctactaaaaatacaaaaaattagccgggcgtggtagcacacgcctgtagtcacagctactcaggaggctgaggcaggggaatcccttgaatccaggaggccaagattgcagtgagcctacatcatgccactccactccagcctgggtgacagagcaagactccgtctcaaaaaaaaaaaagcttgtctcattcacttgttgtaactgcacatttcaagtatgaagttaattaaaagtgacttttactgttatttttttccacagagtaaaatatgttcacccaatcttttaggcagtcatgtctattgcatgaacttttgttatattttatttaccaagattatattaaaggaaacttttagttgtgtacaaattcttttatttgatttgtttttgttttaattatgtgatttctattactataggcaacttcagttcatttatgcagaaggaaatatttgagcagccagagtctgtcgtgaacacaatgagaggaagagtcaactttgatgactatactggtaattacatatgaattattttattatttcagtgtctctgacagtaggaggtgccattaacaacctgaaagttcattgcccttaatagccttgtagaacaactacagctgccagccatcagtggagcccagccatcttggaaaaagttctttagtgtgtgattctacctatataagatatctagaatagtcagattcacagaaagagaaagtagattaatggttaccaagggctgtggggaggggaaatggggagtcactgtttaaagggtacagagtttcagttgtgggatgatgaaattacagaaatggattgtagtgatggttgcacaataatgtgaatgtgcttaatgccactgaattgtacatttaaacatagttaaaatggtaaattttatgtgtaggtcacccactgtgtaccagggactgtcctaggtactgtgaattctaagaagaataagacctggtcccgttgctgggcagcttatgtgtatctgcctggcctaggtttcctttctgagtgtataaataagtaaaagtgtgaacttccccagaggtctttcagttatttgcctgatgcctttggataacctgtaccctcctgcatttttaaggtagaggtgagagtacaacactactcttttttttaggatggagttttgctattgttgcccaggctggggtgcagtggtgccatctcggctcaccgcaactgctgcctcccgggttcaagtgattctcctgcctcagcctcccaagtagctgggattacaggcatgtaccaccagaggaattgtatctgcctctgtagacagaggtggttgttgaagatggttgagctggaagaactgggagagtagcagtaaattcttttatggtatttatggaaatgaggtcaggaaaaagatttgttttataagggaagaaaatgagacaaactttgggaagttcacggttttaaaaagtacttttggctgggtgcagtggctcatgcctgtaatcccagcgctttgggaacccaaagcgggaggatcgcttgagctcaggaattctagaccagtctgacctcctttttactaaaaatttttaaaaaattagctgggtgtggtggtgggtgcctgtagccctggctactgaagagcctgaggtgggaggattgcttgagccctgtagatcgaggctgcagtgagctctgactccaccactgcactgcagcctggttgaaagacctgtctcaaaaaaaaaaaataaaaaagagtacttatatctgtattatgtacataaaagttctgtaataaaacaggatagctgtcatcttttttgttgttaggatgaggagattgaggctttcagtttgtcaaaggtcacattgttagtcatttattgaaccaaactactccccatgtattcattgttctaagtgctctccatcccctcccctgtccatcaggcattctttcttttgcctgtagtgatggcttacctcatctcaaaagggatcaggcttttctcaaaagcatcaaatttagagctttgggcagcttctttcagaactatcccaactatcctcagccaccagaaatttctaggactaattttaaggaaacaaccgtggccagctaatctcactgtcttacatccatgtcattctttgtcatcatctgcaatacaggtctttctggtagttggtctgcctttttttttttttttttttttttgctttgcttttatattgagtctttgcctttgcatgaccctgatccagccttttactgctgtttcctttcttctcaaacatttgtaattaatgccaaggtctgtggaaaacactgtaggcagaggtacacaaacaggcttggtctagtgcagtaacagcaagaaggccagtctggctggtgtggcctgagtgagaggggatgtgctaggtcagagtaagcaggagacaggtcttatgggacttgaaggccaaagtaagtagttcggatttgattataaattatttgggaagctagtgacactttttattttgtttggttttgttttctacttgctaattttttaaaatagagaaacataccttctttcattattgaaattcaaaacggagaacatataattattcaaaagataaaaagtaaaacacataccttggttttatagtataactaactaagataaaaaagaaggtggactggctgggcgtggtggctgacacctgtaatcccagcactttgggaggccaaggtgggtggattacttgaggtcaggagtccgagacgagcctagccaacatggtgaaaccctctctactaaaaatagaaaaaaattagctgggcgtggtggctcgcggcctgtaatcccagctactaaggaggccaaggctggagaatcgcttgaacctgggaggtggaggttgcagtgagccgagattgcaccactgcactccagcttgggctacagagcaagactctgtctcaaaaaaaaaaaaaaggtgaggagatgaagagagcaggggcagagtagacagactgaaaatggttcagagagagcagcaggatgaggcccacgaggaggtacctgtcattctcctcagccagatttggaattgtttgagtccagaagctctcagtgccttgaccactatatttacttggtgggtgattagggaattttagttgaccagttgaatgaatgttgaatgagaatttctcacagatagaaaactagcctgtgtggaaggatttctggacaagacacatggagaacaacatgtaaatagctatagaaactgaaaatgaaaaagaggacagacttcattggagggtctttatgtttttaaaggatcactgtaagagatccttctggtagcatatggagagcagactccaggaggtggagaacagaagagagaactggagaatgttgctgtcgtccagggagagatgctgggtttgaagataaatgtggagggatcagaacaatcaagcattttgactgaagcattaggggaatggggacggcaaagactgagaggagagtgggtttatgttactctacagagcacctttctgggcaccagaggggaaataaacgtaactgagataatatttttcccagacaggtttattgagacataattagatataataaaattcaccattcctagtgtataactctaagtttgacaaacctctacaacatagtcataatcataacctctacaaagtcaagatgtagaacagttccatcactcccaaaatttccttgcaccctattgttgtcaacccctcctccagctccagccctctacatctaatgatctgttttctgtgtccctctacttttgcctttaagataactttcaaagagaagaatgtaaaaataactaactaaggtagaatgtaataaatactgtaattgtgtggggatgtagagaggtgagtaaggtcagttacaagtttgggggcgccagtgaagttgtgacttatttaatttacttttcaaaattacagagaactgtgctttccaagaggaatattaattctttaaaacagcagtattcttcctcatattggcagtggatactcacaaaatgcgattgcctagttcacatggttctttgctaaataattatgtacacaaacttttatttcagtgaatttgggtggtttgaaggatcacataaaggagatccagagatgccggcgtttgattcttattgcttgtggaacaagttaccatgctggtgtagcagtaagtgctttttaaaattttaattatgttgaatattagagaatatctgtagaccaagtagtagtctaataacatactgtgtaaaactatgttttgttaatgtgttatcttttcccttttgtgataaaaaaagaaggtaaggggagaaatttaccagctgcttggaattatttatccatggaagatctgtagaaaaggtccctagatatacagatagacctcctgcaacggacttcatgaaaggccaagagggggagagtttgtgtactgtcctagacttgtagcctagggagcttgcctacatgtgtaagagccatcgttgggttttgcttagcattgttcacttgccctagacagatggcctgcatcatgtgtgaacctcagtgcaattttactttgtgggcacattactgcaaagaaaggtagtctgcttttttttttaaatcagattttattctttaaattgttcttttagaagctgaaattcagtatcaaaaatgtgtattgtcagtgcagaagcataggtgtatgagggtcttttattccaataaaagaccaatatttgcccacgtagtttccttagaaagagacagtttatgtgctgctgatgtcaactgttatgaacagaagacctttacattcaatttctgcttttaggattgacttccaaagttcctgacataacttatttatttgctgaggcataaatatttattaggagccatttatttaagcagtgagtgaaactatctggtcacctgcccttgcatctcaacaagctttgctcttttctaagactacaccaaatacctcctcccctcctcccccaaaattatatggtcctaaacagaaagtctatgtaatgttgaagggtagaggtctaaaaaagtgattgttttgtctgggtgttgtggctcacacctgtaatcccagcactttgggagggcaaagtgggaggatcagttgaccctaggagtttgagcctgggcaacatagcgagaccccgtctctaccaaaaaaaaaaaattatcggggtgtggtggcaactccctgtagtcctagctacttgggaggctgaggcaggaggatcgcttgagtccagaaggtgaggctgcagtgagcctagattgcaccgctgaactccaacctgggcgacaaaaccaggccctgtctcaaaaaaaaaaaaaaattttgaacacgggaagaagaaagatgtaaacacgttagtggtggcttagatctattactgaatgagccctgtattcagaaatagaaaatttgattaaacgcttcatctaacgctaagacaatttgggggcagaaattatatactctgttagaattctctaatgtaagattttttgttgttttgtggatgccaagactactgtagtaaacaaacattagaaatccccctgtggtttatcagacaaaatagtaccatttattttatcctgttttacatttttgttgttgtttcatgacacatttacatgttttttttttagtatctatatcctgaataactgactacactctaatcattcttaactcatttatgccagaggttgcaaaatttttttgtgaaaaatcatcagaccttggtgctgaccttgagcagtaggatataaataactcccacatgcttaacgttccagtgatggaacactaggcataaatgatttaagtatagcctacttaatatgcttttcaaaattttaattttctctaggttttgtagtggcattcagtggaatttatagcattaagttactctattgtgatggaaatatgtcattttgtgtatttataaaaagttgtttgcagctgggtgcagtggtgtgtgcctatagttccagctcctcggaagctggggcaggaggatcacttgagaccaggaatttgaggccacagtgccctagaatcatgcctctgaatagctgctacactccagcctgggcaacaaaccaagaccccatctttaaccaaaaaaaaaaaaaaaaaaaaaaaagttgccccaactaaaataataaactattaattagcacagataaatcttgagattacttttttggggtttattacttttaaatatctggtaagcctccagatttctatctttctctcttctttccccatctttttattttgaagaatatgattccaatgtaacatttatattataaactgggtgaaaaggtttggtttacatttatttgtgggaaaacatttagcattttagtgtcggtaacttaattatgtataataaaatatattaatggaaaagaataataaaaaataggagcattttatcttcaatgattttctttacatgatgttgtaatattgttaaaaaatgccaaatcaaagttatttaatatttttgggggaaccaagtaaaacgattctgttcaaatttgtgggcaagcaaaagttaagggctatgaaataagggcacctttaagttctttattgctgagaaggaggaaagctgagatgggtgagagatggggagggccacttgcctgaagaggctggtgaaaggctgtcaggttaggtgagctccacagttagaattaaagcaacactaaatgtatacattggttgagcttaaagtttttgctgcctaaaagataatttttctgtttttgattttccgatgtttagtgtaaaaataattagaatggaaatttactgaaatgaaggttaaactacgttttgcacagaggcatactgctccctacttcattccccctgccccatgccacaaaagttgaaaatagtgagccctgttaaacaagatttctaaaatatattgacttcttttgggaaatggtcatatttatgaatacgttgtacttttaaagtgtttaatttttctctatatatttgtacatctgttacctgatttgaaacccctccctaacatgggtattacatgaattttcattttaaagattaggaattgggaggttagagataacacacaagctgactcagaaccatgctctttccacttctcaaaacgttttatatgtgtgggtatgtttccttataagaatgtatgtgtccaggcgcagtggctcatgcctgtaatcccagcactttgggaggctgaggcgagcagatcatgaggtcaggagattgagaccatcctggccaacatggtgaaaccccatctctactaagctgggcatggtggcgcacgcctatagtcccagctactcaggaggctgaggcaggagaattgcttgaacccgggaggcggaggttacggtgagccgagatggcaccactgcactccagcctggcgacagagcgagactccgtctcaaaaaaaaaaaaaaaaggaatgtatacatagatagttgtctaaagagactgatagtaaaatgttagccatgcttatctcaagtggtaggattttgattttttttttttaaatattttaatctgggttgtttttattttctaacgtgtcatttttgtaatcagaaaaagcaaaaactatacattgaatccaaagaagtccgatgaaagagtatttgaaggaaagttctgtgaccaagtcatattttctctgcagacacgtcaagttcttgaggagctgactgagttgcctgtgatggtggaactagcaagtgacttcctggacagaaacacaccagtctttcgagatgatgtttgctttttccttagtcaatcaggtgtgttaattttaaagacttaaaaggaaggaaagttattctttctaataattctagcatatcttggcaaaagctgatatttaaagataaactggcattgcagatgacttgacgaatacagatttattttaatgttacataattctttatgaattagtaaaaatgaacaccttttgtgttcaaagagctggattttcaatgacagagaaggaagagagatcctgacaagccatattactttaaagttttataaatttattaagtggatgttttgtattttatttaaaacaagtaatattgttgaaagtgtggtcaatttgtttttgctcctaagaaacagcatatgttaaaactgttctgtgtgttatggttggcctactttttacacaggtgagacagcagatactttgatgggtcttcgttactgtaaggagagaggagctttaactgtggggatcacaaacacagttggcagttccatatcacgggagacagattgtggagttcatattaatgctggtcctgagattggtgtggccagtacaaaggtaaannnnnnnnnnnnnnnnnnnnnnnnnnnnnnnnnnnnnnnnnnnnnnnnnnnnnnnnnnnnnnnnnnnnnnnnnnnnnnnnnnnnnnnnnnnnnnnnnnnnnnnnnnnnnnnnnnnnnnnnnnnnnnnnnnnnnnnnnnnnnnnnnnnnnnnnnnnnnnnnnnnnnnnnnnnnnnnnnnnnnnnnnnnnnnnnnnnnnnnnnnnnnnnnnnnnnnnnnnnnnnnnnnnnnnnnnnnnnnnnnnnnnnnnnnnnnnnnnnnnnnnnnnnnnnnnnnnnnnnnnnnnnnnnnnnnntttaaccatttttgggaatttttatttacctatttatggtttctaataaataatgtaaaaatatacatactacctctgaaagtttgtaaggaggaatacacctttggtataaaatttggcaactgccaggcatggtggctcacgcctgtaatcccagcactttgggaggctgaggcgggcggatcatttgagctcaggagttcaagaccagcctggccaacatggtgaatcccgtctctactaaaaatacaaaaattagccaggtgtggtagcacgtgcctgtaatcccagcatacccgggaggctgaggcaagagaatcacttgaacctgggaggtggaggttgcagtgaagcgagattgtgccactgcactccagtctgggtgacagagcaagagtccatctaaaaaaaaaaaaaaaaaaaaaaatttaaaatttggcaattaaaaaaaattttttaatgagtattgtatgacaatatctttctctttagatattgctctggggaggtttaaaggtactgtcttgtgttttgaaggcctggtaagactactttgctctttggaattggaatatgcataaatttaggtggctaataaaaataggaaatcttagaaagttgtataaatacaagagatgttatccctccacaagtgtttttttggggttttaggtttgtttggttgttatttagagacagggtcttgttttgtcacccaggctggggctggagtgcagtgacaggaatcatagctccctgcagcctcagactcatgggctcaagtgatctctgcctcagcttcctgagtggctgggactgcagatgcaccaggctagttttttttttttttttaagatggggtctcactatgttgtccaatgtgttactttttatgatttcacatttttgttttctcaatatttttctacttaagtttgatatttcttgctgattatctaataagatgttgggatattggtggatttgagtttaattaaaggattgtgaaagacaatgttaatgtgtacataactgcatttgaattcttttccctcaaagattctcatagagaattttttgtagaaagtttgtgattcttatataaaaattcttcttttctttttctttttcttttttttttttttttgggagacagactctcactctgttggccaggctggagtgcagtggcgtgatctcagctcactgcaacccccgcctcctgggttcaagcgattctcctgcctcagcctcccaggtagctgggattacaggcacctgccaccacgcctggctaatttttgtatttttgatagcaatggggtttcaccatgttggccaggcttgtcttgaactcctgacctcaagtgatctgcctgcctcaacctcccaaagtgctggaattacaggcatgagccacactgtacctggccccccacctttttttttttttttggagacagggtctctcctctttatcatccagagtacatagagtgcagtggtgctcatggcttactgcagcctggaccttcccaggctcaggtgatcctcccaccttagcctcctgagtagctgggactacaggtacaggccactacccatgcctggctaatttttgtatttttttgtagagacggagttttaccatgttgcctaggccagtctcgaactcttgggctcaaacgatctgcctgctttggcctcccaaagtgctggggttacaggcataaaaactcttgagtgagatttttatttcttgggtatttcgatattgctaacactataatttacagagtgctgaaacttgaattttctccatatggtaattaaaacgtgttacatgtttgtgcttgggtttccatcctgtggctgaataaatgaccagccacctttagtagcacttaaggatttgattgggggattggaatcccagaggctctttatttataacagattgtgaaacaagggctacaacgtggtgtatgtgggatatgggattgtttggatggatgccattgacttaatcttttcataaaatgtttctggaattgtgagctgccaagggaaatatatattttacatttctcattcctttgtttatgagaactttaatttgcctcaacattttatgatgatgattttcaaatatacagcagagttttaaaaattttacatacaggctgggtgcagtggctcacaactgttatcctggcactttgggaggctgaattgggaggatcacttgaggctaagagttcaagaccagccgaggcatcagagtgagaccttatctctataaaaaatacaaaaattagcggggcatggtggtgcgtgcgtgtagtcccagctactcagggaggctgaggcacgaggatcccttgagcnnnnnnnnnnnnnnnnnnnncaccactacactctagcttggatgatagagtgagaccctgtcttaaaaaaaaaaataaaaattttacattagcattggtatacccaccatctagcttctaccatagcatattcaccaattttaagtgtacagttttagtaaattcatttggctgtacaactgttatcacaatccagttttagaagatgatcacctgaaatattcctttgtgtttctttgtagtcaatccttactcctaccctccagcctcatactcaggaactactgttttctcttgctgtattatggcattttccagaaaatttttgtaaatggaattgtataacacgtcttgtgtgtctagcttctttcatttagcctgaagtttgttttttaaataaagccagttaaatttagcagtgaggtattgtataccaactttagtaacgctaatgttaatgagttctagtgacccactattggactaccctagcctgaagtttttgagatttgttcatgttgttatttgtatcattagttctttctttctgcaaatcttttttttaaatatttttattttgaaataactatataggaagttgcaaagatagtacagagaagtcttacatactttttacccattaccccagtggttaccacctatataagaaaaattagcatctttttagtacagactttaatttttttcaaaaataactcttaaaaaaattgagtaagtatggcaatttagtatttcatttttcttggattctaaagtaattttattcaaatgtcttagacattttgggcttagttacttacaataagttttgggttatttagtcacagaccattccaggtggcaaataagagtttttatgttaatgggtattgaaagaagtcgattattattactattattattattattttgagatggagttttgctcttgttgcccaggctggagtgcagtggtgtgatctctgctcactgtaacttccgccctctggtttcaagtgattctcctgcctcagcctctcaagtagctgggattacaggtaactgccaccacgcctggccaatttttgtatttttagtagagactgggtgtcaccttgttggccagtctggtctcgaactcctgaccacgtgatccacccgtcttggcctcccaaagtgctgggattacaggcgtaagccaccgcgcccagccaaaagttgattattgatcctaatccctgggcccagtgatggagcacatagaagaattctgtgatcttgcctgtaaattctcaactttgcctgaaaaactgtcaggattagagggatcttactgagtttctcatagtatcagaccatagacaagttgatactactggaggaattgatgggtataaatggtaggttcagcaatttttatatgttattgcaggtgtttagaatttcaccacagtgctgacttttgttgatttaaaaaaataaaaatgtaactttgtttttggctgaacaaaaagaaaaaccaagtttaaaatttcagagtcagcattttcctggtaaactctttcaaacctcggtagattctgaatgtagggtatagcttatttttcctcataattggtttcctggtatgtattgatgaaattaaaaatatgaaattcaaattagaaattaaactgtaatagcaatgcaatggaaaaacatggattaaagttgctccgtttaatatttgtacttaaaaactagtgttcagatggtttcagttcaaacaaataaacactagtttgtagaataacatttttagttatgggctacaggaactggaatactcattatctgatcagtttggattggaaacagtttaagtattccaggggtccaagatacctctggcctggtagtatgttttgtgattaattgattaattgaaaagtaaaccacagtaggaagaagtagactggaagagtctggaatttagaatatagatgtgctcattagtctcggaggcagaggactccaaattcactttagtgttatgggaaaagattccagtctgctggtggaatataataggtgtacagggaggcagttgtggaggaccatgtgagcagctggaggctgggaagtccagcaggaggaaacagggagtctcatttaactattgggatgttaaggagttaccagactgtgattttattatagagggagtctcattatccacatcatgccaggaaatcactaatggagtaatcccttatcaagagaagagtaatagaaattcagcatataatccgcgcgcgcacacacacacccctcagcataaatttcctaaagctaaaattatatctaacactgtaactgacaacagcacaataacctactgaaagagatgtaaataaaagcctcaaatatctgaaacataaaaatgtttttcaaaataactattggattaaaaaaaatcagaactaccattaagaaagacttactagaggccgggcgtggtggctcatgcttgtaatcccagcactttgggcagatcacttgaggacaggagttcaagaccagcctggccaacatagtgaaaccccgtctctactaaaaaaacacgagaaaattagccgggcatggtggcgggcgcctgtaatcccagctacttggggtggctgaagcaggagaatcacgcgaacccaggaggctgaggttgcagtgagccaagatcatgccattgcaatccagcctgggcaacaagagcaaaactgtgtctcaaaaaaaaaaaaaaaagaaaagaaaagaaagactagaaaaaagtaaacaataaataataggggtaaaaatttagagtgtgtggccaaagtgataaatagagggaaatagcattaaattcctagcacaaattgatgaaaatgccatatttttaaatggaaagattgttttgtaaagaaatgacatatcttgggttagaattagtgttccttcaacttgcactaaaattaatttcaaacaggctaaaaaggaaaatgttaaaaaaataaaaaggaacagtgaaaacaaaagaagtaagaaaatttaataatacttagtttatgtaggatgtggaagagttatctgagtctaaaagtactacgtaaaagttaaaaaattatgtcagcaccaatataaaaggtcagtccacgatgagaaaaaatatttgagacataacaataactaccttcttttttttaattttagagaatagtattgtattgaatacgttttattcacagaaaaataaactttaatctacaatgaatgccagattatacagcagaaagcagttttcttagttttccacatagaaaggttcttactaagtgaaaaaaaccataaaattatattcagaaatatattactctgtctcaaaacatttcacatgattattcacaatactaatacaattagatcagtcattcagtcaggttaaaatataacagtaatgaaaaaaatgcaaaatctaacataaattatattaaaacccttgttacatcacaccaaaaatgcaaatttcttactaaatccagaaaaatggtaacatatatagtaatttaaggtattacattaatggtacagaataagaaagaagtggtaaactctgaaaatctgtaggcatatctgcaaacttcagacttcaaagtagaatctgaccacccaaacattaatgtagcatttgtctaatttttttgttttgaacaataactaccttcttaaaaccaatttgaataaagaaactcaagttgaaaaacaggtgaggaacaacaaagtcagttgtcaaaagagaaaatataaatggtcaacaaacatgaaaaaaaagcttagctttaggattcaagatatgtatgctaaaatagtagtgaaggttcattgtcccgcagtcaaaatggtaaaagtttgctaaagagataattctcagtatttcacagaacttgacaaaacaggcacatctcacagtcacataaagttagtaagaatgaaaatagtcttggcagtaggattgtgagttttgaaatacatacaattctgtatcctaagaaactaattgtcttttagttcaagctgtcatcaataaaatttatagtacgttttgagcctgtgtgtcagggattatacagaactgaatgcgttacatttgtctcatttaattgtcattataatcttgtaagtgtcatgtgcatttaacagatggggtatctgaggcctaaagagatgaaaactgctcaaggttataatgtaacttgacagagttcagttttaggattacacttgtactattatttaggagtgaaagcaagttataaaattgtacctgctaattaattttcttaactgtgtaaagaaaagaaaaacagtaaaaactttaaggcaatattcacaagtgttattaatagcatattattaatgtaattatttctaataacagatgagattaaatattatttctgtttacttttctacaactgtagttttccttttttttttttttaatgcaaacttaaaacataaaactgggattgaggaacaggcaataggcaaaggtggaaatcaaagagcaattaaaaaaaaaaatccagcaataccagtgcaagtaccccaaggagagtttatcaagcacttgccttttgacttacaccaaaaactaaatgtggttaggcacatgctgatttgctcatcttttccttcctttcttagggatattaggaattttataagcattcaatgggttataaggtgtttggcttttgtatctaagaaataaaggttgagtcatttgttcaagattcagaaaaggagaatagtgatagatttcccaagtactggttcagttcactgttactaagatagtttatttttgttttttggagacagggtctcactctgtcccaggctgcagtgctgtggtgcgatcctggttcactgcaacctctgcctcccgggctcaagtgatcctcctgagtagctgggaccacaggtgcacaccaccacacccagctaatttttgtattttttttagagacagggtttcgctatgttgcccaggctggtctcgaactcctaagctcaagcgatccccctgccctggccttccaaagtgctgagattacaggcatgagccaccatgcttggccctaacgtagttttaagagatagagaatatatactgtaaaaccaatgggaattttattttcagctttttaaaattaaaagttctaaattcttcagatgcagctgcaactaattgtcctgcttttttgtgatgtttcaggcttataccagccagtttgtatcccttgtgatgtttgcccttatgatgtgtgatgatcggatctccatgcaagaaagacgcaaagagatcatgcttggattgaaacggctgcctggtacaaagacactcatatattacacttttgttgtctaagggagtgggtaataggtaaaattctcttatccttgaagctgtggcttgtagctatttagtcaataagatctttctacgtttgctccgatgtattaaaaaaatacccatactgattgatagcacagaggaatagaaacactggtcttttgttatttgctgccaatatattgttattttatttgtttggtttattgtccttttttgctaatattacttcttagatttgattaaggaagtactgagcatggatgacgaaattcagaaactagcaacagaactttatcatcagaagtcagttctgataatgggacgaggctatcattatgctacttgtcttgaaggggcactggtaagttttctcagttctaattagtatcagtccattgacctgcagacctgacacatagtcatacttttacattaaatgaatgaaataggtagaacttttgaaagtgcttctgtatttatgcattgtggtttgtttactttgagaaagtgcaacagagaactctgttcagaagtgaaaatcaaaaagagtacattttaacatgataaacttggatttagcaagtaacttgggttaatttgttcaaatatgaataaagattaagttctctagataagaaatttaattgaggtcaagctgggcacagtggctcacgtctataatcccagcactttgggaggacatggcaggtagatcaaacttgaagtcagaagttcgagaccagcctggccaacgtggtgaaaccccatctctactaataatacaaaaacattagctggatgtggtaatgcatgactataatcccagctacttggggaggctaaggcgggaagatcacttgaacctaggaggtggaggtggcagtgagccgagatcacaccactgtactccagcctgggcgatcgnnnnnnnnnnnnnnnnnnnnnnnnnnnnnnnnnnnnnnnnnnnnnnnnnnnnnnnnnnnnnnnnnnnnnnnnnnnnnnnnnnnnnnnnnnnnnnnnnnnnnnnnnnnnnnnnnnnnnnnnnnnnnnnnnnnnnnnnnnnnnnnnnnnnnnnnnnnnnnnnnnnnnnnnnnnnnnnnnnnnnnnnnnnnnnnnnnnnnnnnnnnnnnnnnnnnnnnnnnnnnnnnnnnnnnnnnnnnnnnnnnnnnnnnnnnnnnnnnnnnnnnnnnnnnnnnnnnnnnnnnnnnnnnnnnngctctttcctattagaaaatcaaagaaattacttatatgcactctgaaggcatccttgctggtgaattgaaacatggccctctggctttggtggataaattgatgcctgtgatcatgatcatcatgagagatcacacttatgccaagtgtcagaatgctcttcagcaagtggttgctcggcaggtaagtcgggggactgtgagaacaccttggggatcaaagaggggagttacgctagcttatttgaatgacttacaaaacatgtttacacgtgttaactcatttactttggaatacagcctttgaggtttacatgtgaggaatcagatacttaagagtttttttttttttttttttttgagatggagtctctgtcacccaccctggagtgcagtggcacaatcttggctcactgcaacctctgcctcctgggttcaggcaattttcctgcctcagcctcccaagtagctgggattacaggcacactccaccacgcctggctaattttgtatttttggtagagatggggtttcatgttggccaggctggtgtcgaactcctgacctgaagtgatccacctgcctcaaccccccaaagttctgggattacaggcatgagccaccccgcctggcccagatacttagagctttaagaagaccaaggtcatagatctcatattgggcagaaccaagaccagaactgaggtcttggtctccacatcctgtcttcttttagttaacatatgctgttcctttttaatttaatacttctaaaacatttaaaaatgtattttaaaatatttttaaatatatatttcagctggttgcagtggcacatgactgtagtcccagctactctggggactgaggcaggaggatcacttgagtccaggagtttgaatacagcctgggtagcatagtgagaccctgtctctaaaacagtaaataaaataaattaaaaaaaattacacacacgcgatatatttcaggggaaatctaacatctaggttttattttaatattatataattgagttttcttcagatcagttggctttatatataaattccaaaagatattattccctaagcacaatgtggtggtaatgaacttgagctttgaagttaggcaaacctgcagtcaagtactaagcctggtatttcttagttgcatgagtttaaacaaattactggatcccataacgcttctgtttcctcgactataagtaataacaatcagatttactacacaggaatttaaagaagtctgtccgtgaggcttcatatggattatgcagtgcaatttttgcacattcgtaagctatagccctgcctttgcccaccagtgatgttgtgtatgtgtgtgattttctttcctaggggcggcctgtggtaatttgtgataaggaggatactgagaccattaagaacacaaaaagaacgatcaaggtgccccactcagtggactgcttgcagggcattctcagcgtgatccctttacagttgctggctttccaccttgctgtgctgagaggctatgatgtaagtcatctaccactgcagaaatcttgggatggttttttacctggatacattctgatttttttctcctaaatttttaacaatagtgtttgagaaatctatcaaatatatatctgtcacctgttatattttcatggcccaatttgtaggttacatcacaacatcttcttacccatagaacttgaaggaaccttggggttcacctccaagattgtgactcaccttgggtagtctccacctgttttcttaatataacctctatctcttaacagggcagctattggcatttggcaggacaattcttttttgtttggaactgtcccacacattgaagactttgtagcattcctggtttctcagccattgtggcaaccaaaacatagtgcttttgtttttagtgtcccctatgagggctactacttctgtagaggaccacagtagctctttctgtgtgaactggcacctttagaatgctttttcctaaccaatttcagtttttttcaggacacattatgtgattatattttctaatctaattctttgtagtctgtaataaagatggttaatgaatgtattgttttctgtttttataaacaaaaataatttgcttatagtaaccacccccttccccagtctatataatctctcaaatcttgctttttttttttttctttttgcaggttgatttcccacggaatcttgccaaatctgtgactgtagagtgaggaatatctatacaaaatgtacgaaactgtatgattaagcaacacaagacaccttttgtatttaaaaccttgatttaaaatatcaccccttgaagcctttttttagtaaatccttatttatatatcagttataattattccactcaatatgtgatttttgtgaagttacctcttacattttcccagtaatttgtggaggactttgaataatggaatctatattggaatctgtatcagaaagattctagctattattttctttaaagaatgctgggtgttgcatttctggaccctccacttcaatctgagaagacaatatgtttctaaaaattggtacttgtttcaccatacttcattcagaccagtgaaagagtagtgcatttaattggagtatctaaagccagtggcagtgtatgctcatacttggacagttagggaagggtttgccaagttttaagagaagatgtgatttattttgaaatttgtttctgttttgtttttaaatcaaactgtaaaacttaaaactgaaaaattttattggtaggatttatatctaagtttggttagccttagtttctcagacttgttgtctattatctgtaggtggaagaaatttaggaagcgaaatattacagtagtgcattggtgggtctcaatccttaacatatttgcacaattttatagcacaaactttaaattcaagctgctttggacaactgacaatatgattttaaatttgaagatgggatgtgtacatgttgggtatcctactactttgtgttttcatctcctaaaagtggtttttatttccttgtatctgtagtcttttattttttaaatgactgctgaatgacatattttatcttgttctttaaaatcacaacacagagctgctattaaattaatattgatatattcagtattctcttcaactttgtcacgaggaagaatttcctgtagttaattttaactttccttcattacattgttgcataaaactagtcccttagtgccagtttggaagttacttgcaattgtttggaagatttgcaggtcgctgacctcatcatttcactctaagtatatgtggtaggctaagctcagaaaaaggtatgtatgctttacactgataggcaccaaatttagtattgtatcctaagtatttttcctcttctgtattttctgtgctctacccctgaaatatatttaggaataaagaagatataaataaagtgatattggggtatgttcagcttgtaagtgtcagaaatggaagttgacaatttggattaaaatatttaaagtagaatgttattatttgatacccccaaaattgtgagtaataatttcttaatggagcttttctggccagatcttcagggctataggagagtgtgtttgtttttggtgaagtccttctttttcaaaggtttttacttttaaattgtgaagataagctatttagcacaattatttaagtaagctgttttttcctttcttttctttcttttcttgttttaacttctgggtgaggttaagattttctaatagttattgttgttgccagagaagcatagaattctgcttgtgtcttagggttagagaaagatttgttatattttgaggtaatttggaaggactttcatacatggtgactagaaacctgatctttttaagaataaaatagggtcactatttacattatatataatatatggctattatagctatattaatctactttaattgtttctaagattattttgtgtaagtcagctagcgtgtgtatagtgtcatttcttatgttttgtatattaacgttttacaaacacaatttgtgtgggtttgtagcatttcttatagtttaaagtatgattcagcattctaagttaaaactaatatgtgaagtcagtcattagtctgcataatctctgtctccctctgtgtgtgtctttctataaagcacatgtgtacacacacacacacaaatatactgaaagctagggtaagttctaaactgaatatcaaaaaccaaaatcaagaacaaagaagtgatattttccaaacaaacatggattctctgccgggtgcagtggctcagcctgtaataccagcctccactttgggagtctgaggtgggagtattgcttgagctcaagagttggagaacagcctgggcaacatggtgagacctggtctttacaaaaatttttttggccggacgcagtggctcacacctgtaatcccagcactttgggaggccgaggcaggttgatcatgaggtcaagagatcgagaccatcctggccaacatggtgaaaccccgtctttactaaaaatacaaaaattagctgggagtggtggcgtgcgcctgtagtcccaactacttgggaggctgaggcaggagaatcgcttgaacccaggaggcggaggttgcagtgaggcgagatcacgccactacactccagcctggcgacagagcaagactctctcaaaaaaaaaaaaaaaaaattttttttttaaatgggctgggcatggtggcttgtgcctgtagtctcagcaacttgggaggcttaagtagtaggatcgcttgagcctgggaggttgaggctgcagtgagctgtgattgtgccactgtgcttcagcttgagtgacagagtgagaccctcctgactcaaaacaaaaaacatggtttctcctctctctcctgtcttcttactctctatcccatttgatgtagtgatttttaaatgcttttgtaagttaattcttaacacaaaagagacattgtaatgaggcacaccactaaagtgagcatgcccaattaaaaccagtgtaatataggataagaaaatctgatttttcaaaaaagatactctacataaagaatccttcatataaaaagttctttcttgtagtacatttaaagttttaattcactcatgtataactgagagttcctttgagccctttttaggcagggaggcatgtctgtcatctagcgtgtggcccagtaagtgattattacattggaatcagtttttcagtcttttaaaataaattctgtgccataagaataaaagataaagagaaaaattaatgttaactatttttagcttattataactatgtcaacaagtgtttattaatacctattatgggaaagtcactgtggttggcattgaaaattacatcatctttaaagcagtatttgtccccagatggactcatcactagcaaagactaggttcattggaaggcatagggtgagagaatgggaagatgaagtggaggcgggttgttaaagtgctgtcagtgagtgattttgtctacttgaataatggtccatgtttgggggcatattgtgtttcataagaagtgaaaggtatttgcaaagtaagctacaaatgacccataaatctgttaacaacagtccttaatatgcaaagatgaaaaacaagcattactgctacccaaagggaactggtgcttggtgatgtgcagatggggctgttggttaagagagctattacaggttttctctcttaggtttcataggaggtagttactgagatgagattgttttatctttttgaatacagatctcttgtcttgagttagttctgaggatgggagtaataaaggagttttttgtttttttgtttgtttgtttgttttggctccttagtaatactcctctgacatttatttctattattcttcaaagaaaggaaaccaactgaaatgtttgctttaacaaacattttaataagttctctgggtttttttttccccttttaaaaaaattagcatataccatagcaataaaagaactaatgttaactattgtatgctacaacttaagtgatttttctaaagaagcacaatgtcattgaaagtattattgaaaaggatcatagtcacattgaatttgtgaaggccaaagaaattgaagggagtgatattttcattttatgatattcacatatttagtaaattttgtgtacaagaataccaggcagagtgttttacccatggaaacaggtttcagattactttatttttactgttagagtctcaagtttagaaatgctaacacttaaatcagtttttttctcactatacttgaagattgttaatattttgatatcttcctagcttgatgaatttaaacatatcttcagatctgtgacagtgacagccaataggactgataatattagcttcaaaccaataatatccagggttaaaataaaaatcatagtgaaagtacgattgtaaaattatgctatattaacttttaagtctgtaataacttgacatcaaaatgttatgtaattaccataaataatggctagcgagaacatctttggaaattctcaaattacctttcttactacactgtttgcagaatgaatgtagaaatgatcctgttagctttctgaatgttctgtggttgaatgtgtttttgcttaaataaagcttttggtatttgtttaaattacacttcttgagaagtggaaattttaggatcatctttgctttgtttcagttttgtgatttttgaaatgaatgtttagtttactgagccagttggtcatttcttcctcatgtcgttaagtccagtgagtaagcctgaactgtgaataaattaccaaaaacttgcttagaatttcattttgaagcaatttgctaatatttgaagtgtatacacatttgtagttatgttagaaattgtattgtactaagaatgtaatcaatgtctactttagttgtaaacatttctgatgtcaaaactttattcattactgttgattttaagaataagaaatcactgcctaaatattaccaaaagccactgtctctacccgaacttcccagtttgggaaagaatcgttagataaaacaaaggctctgccctttctgataccaaactccacagatactttctcacatcttttaaaacattttgcaataacatattgtttataggaagtttacggggtatgcaatgattaaaacttttaagtgaattgatagttgcaaaagaaaggataatatttaaggtcagtgagtagcaagacaatctaaagtttctgtaatatctggctctctgttaattatagagcaaagtttcccttacagaatccttttatgaacagcaagctagagtctatccctagtggttatagcacctgctgcgtttttcaggagacagttaggccagggtgatttgaatggatagatgtgctgttttgcctgcttgtagaattcagcccagtctttggtctctctctctctctccctcctccacctctccctctctcttcttctgcaccagagcctaaggctgcgccaccaagatgcgtcattttttccagaggcttcttttttttttttttgagatggagttttgctctgttgcccaggctggcatgcagtgctgcaatcttggctgactgcaacttccacctcccgtgttcacacgagtcttttgcctcagcctctggattagctgggattacaggcacgtgccaccatgcctagctaatttttgtgtttttagtagagacggggtttcaccatgttggccaggctagtctcaaactcctgaccttaagtgatctgcccgccttggcctcccaaagtgctgggattacaggcatgagtcaccgtgtcctgcccagacatatcaaatttgacaggtattgtataccctttggatctttaggaattaatttttgcctctgtcactcagctttgtatattttgaaatggagataagtatagggaggtcttggaaggaaaattgccagaattcccaaaccatgtaacactcattgagaattccagatccattatatctaaagggcaagtgaaggaaacagtattgtgaactgggtataactccttggttcttaactagtacattcttaatctgtgagacccaaaggttgataaacaataatttaagattgtacagtactctaaacgtctgcaaaggtctagatgttatcagtatcactagtttttatttctgccagtagctcccttttaggttacattgttgtcctctttccagtgtcgcatctgtcattggtttttcactatggcaagttcattaaaaagcttgctccattgttatcttcaagtaatgcccataaggagatggaagatatctgagacaattaaggctttagcttctaggcaagagaaataacgttgcattaaatttcaagtttctttctgctagacttgaatgtgtctagccactctaatttatgggggcttttggttttttcctattgtactttgtatgtagaattgttttgaaatatcaagcatatttactttgaatttgaactctttcttaattttgtatttatcctttgaataaaatgtaaatccaatatttattattaatttactttcattgctgctacgtagaaacctaggaagtgttgggaatctttgtaggatttctgtcttttgttcttggttgttagcttggacccatgtggcattactaaagtttagagcatttctttgtttgaaaaaaactaatttagaaactttttcatatatgtagtctttttttggtgcttgaagtggtaaaaataagctggcctctgaatacagaattgactttgctgacatgacactgggaatttaaatgatttctgtcttcccagcagggacaaatttgtataaattagtttgtgcattcctagttctattagaagatagggctgattattattattattattttgagaaagggtctctcccagttgcctaggctggaaggcagtggcatgatcatagctcaatgcagccttgacctcctaggctcaaggtgtccttccaactcagccttccaagttgttgggaccacaggtatgctctagtacatgcagctaattttttattagtacagaatattcagcagacattgtccagcacagttcaccctttgcaacacacatctagactcacccttgaactcatgtttaaagttccaaagaaaaacatggtgaaaccccatctctactaaaaatacaaaaaattagccgggcgtggtggcaggcccctgtagccccagctactcgggaggctgaggcaggagaatggcatgaatccgggaggcggagcttgcagtgagtggagatcgcgccactgcactccagcctgggcgacagtgagactccgactcaaaaaaaagactatcatgattctgcctgccatggatcagctatcccttttgaaatgaagacacgctcaccctcttcccaagaagaggagataagaagttacacaaattacttggtccatttctgtgtggtattattcctcttgcttaatcacaacctcccttgatataaaagtcttatacacagtcatcccctcttgtctacaagggatatattccaagacccccagtggatacctgaaaccacagatagtaccaatccctatttatatttatactggttttttttgtttttttttttgatctgataaccggcatagctactaagtgattaatggacaggtagtgtataagggtagagacaccagacataggggtgtttcatgnnnnnnnnnnnnnnnnnnnnnnnnnnnntaggggtgtttcatgtcctgggtgggacagctcaaggtttcatcatgctactcagatggcatgcaatttaaaacttattaattgaagccatgcttgtaatcccctaggactttgggaggccaaggcaggagaattacactcccataagtattccaagacataaaagctcaaaatccaaaatgatacacatgggagataagatactacaaatgatagaatcaaatttgccaacactgcaaacattttaggcagtcctcccgcctcagcctcctgaatagctgggactacaggtgcatgccaccacacctgatttttttcctttatgtagagatggggtcttgctatgtttgcctaggctggtttcaaactcctggcctcatgcaattctcccccattcaaaagaagagagactctctagaatctctttatctgactaaggaaactactttccaaaaaaatgcaattgtcttaagacccccttttctaggaatcttataaccaggaaagataaaccactggagaagacaaagagattaaaagttgtcatcatgcccagatagacttttcatctgttcttctgagaacagctttgagagtttacttgaaagactatttgcataaggcaacctttgttcacaatgtagttctacccctcaccttcctgtaatttgctgatcatattcagttttctaagataatcaattataagataatgtctgcctcccaggttgattcattttccctagaaattatttactacccttccaaaacagctccccaccccattttcctcttccttataaagagggtgtttgaatttcagccatgtgtccttgctttgagtctcatatttgtgggattcccatgtccatgtgcatatgaaatttgtgtgccttttctcctgttaatctgtcatagctcatttcagcaaaccttcagagaggaaagaaggaaagctttacttccatctctgcaatctgtagattacttataatacctaatacagccaggcatagtggctcacacctgcaaccccagtgctttgggaggctgaggtaggaggattgttggagtccaggagcttgagactagcctaggcaatgtaatgagacaccatctctagaaaaataaaaataaaaaaattagccaggcatggtggcttgtgcctgtagtcctacctactcaggaggctgagataggagaattacttgagcctaggagttcaaggttgcagtgagctatgattgtgtcattgcactccagcctggacgacagaacaagaccatgtctctaaacaaaacagaccacccaatataatgtaaatgctgtgtaaatagttgtattgtattttaaaattggtattttttattgttgtaattttatatatctttttaaacaaatattttggatccatggttggttgagtccatggatgtagaacccatgggtacaaagggctgactgtatcagaagcagtaagaggaatcaaatgtatgacaaaggaataagacaataaagaaggacaaggcagatttcaggaaggactgaaaatgaaatataacaattgaaattagaatggataaacagattaggcccagctgaagagagaattagtgaacaaaaagataggtctgaagaaataatccagaatgcagcatttactatagagagtgatagaaaatgagaaaagtcaaagcttcttgactttttagagaattttctagaccagattaaaggcaaatcctagaatttagagtgcttcacacatcttaagctgataaaaggaaattgcattcttaaacacattgttttgaaactgaacacaaaagatgaagagatctaaaaagccagagagataagactacccacaaaaagtcaataattagactgacagcttatttcccaactgcaccagtggaaacaaggacaatggaactatttcaaagtgctgaaaaaataattcatgaaactgaatttgaagactgatgggaaaaatgtgctatctgatgaataaaaactgggactctcactaaaatcttccaaagataaatgctaaggtgatggaaaatgatcccacaaaggcttaagatacaacataatgaatggtggctgggtgtggtggcacatacctgtagtcccagttactcaggaggctgaggcagcaggatcacttaagccaaggagttcaaggctgtagtggactatgatcatgcctgtgaatagccactgcactccagcctgagcaacatagcaagatcccatctctttaaaaaataaaaaagaatggtgagcgaaacaaaacaaaacacttttaagtgagggtaaatctaaagcactaacggtctaaaacagtaatattttaggagctataaaacaatccataatgaactaaaatgctagacaataatattgtaacttaggagtagatgagcagggttaaaacataaggctctttttatgatgtggcaagagggtaaagataacttctgactttgtgaagttaaatatggatatttaaacttttatgaaaactaagattagagaatatagttcccaaagtaacagaagaaaaaaaatggaatttaggaaatccaagtacattggtaataatcacaacaagtatagaagacatctaaaacacagggacacagaaaagttgaatgtgaaaggctggaaaaaggtacaccaggcaaatcccaacccaaggaaagatggcaagctacatgaatatgacaagatagactgtaagtgaaaatgacttatttgaaaatagtgcgtcttccatggaaaagtttggtagcttctcaaaaagttaaacatggaattaccatacgaaccagcagttccactcctaggtatatacccaatagaactgaaaacagaaactcaggtacttgtacaccaatgtttatatcaggattacttataacagccaaaaggcggaaacaacccaagtgtccatcaacgaatgaataaaggaaatgtgatatatacacacaatggaatactactgagtcataaagaggaatgaagtcctgatacactccaaatcatagctgaaccttgaaaacataagcaaaataagccagacattaacgaacaaatattatatgattccatttatataaaatatctacaataggcaaattcatagagacagaaagtaaattagagattaccagaggcttgaaagaggaaaaaatggggagttattgcttaatagatacagagtttccattttgggtgatgaaaacttttgaagatggatagtggtgatcattgcacaacattgtgaatgtaattagtgccactggattgtacactgaagaatggttaaaatggcaaattttatgttatatgtattttaccacaataaaaacagtttaagactggatggattggctcgtgcctgtaatccaagcactttgggatgctgaagctggaggatcacttgagctcaggagtttataccagcctgggccacatagtgagttcctgtgtctacaaaacaaacaaaaaaccaaaacccttaactgggtgtggtggtgcatctgtggtcccagctactcaggaggctgaggtagaaggatcacttgtgccaggagcttgagtctacagtgagctatgattgtaccactgcactccagcctgggtaacagagcaagaccctgtcccaaaaaaaagtttaaaaaagcattactagagacaaaaattgttaccatcaaatgataaaagtttcaattcaacaggtattgcatttaacacttttgccaaatggtgaataaatctttgtctctcattatggttttaatttatatttcctttttttctttttttggagatggagtcttgctctgtcacccaggctggagtgcagtggcgccatctcggctcactgcaacctctgcctcccgggttcaagcgattctcttgcctcagcctcccgagtagctgagactacaggtgagcgccaccacgcccagctgatagtttgtatttttagtagagacggggtttcaccattttagcaaggatggtctcgatctcctgacctcatgatccgcccacctcagcctcccaaagtgctgggattacaggcgtgagccactgtgcctggcctatatttccttgattattaatgatttgagcatcttttcatatgtgtattgactgctttttttggtgatgaatctgatcaaatctttttaaaatcagtttttaaaaattggatgatttattgtttactttttaacttggaggggttttttacatattctgaattctagttctttgttgtgtattgcaaatatgttctcccctttgtgacctgtcttttcattctctttttcgtattgtatagaaattcttaactttaatgtagtcaaattgattacttattttccctgatttgtgcttttatgtaacttgttcaaggaatccttcctaggtcttaaacatatcctcctgtattgttttctaaaacccttaaagcttttcctttcatccttggatttttagttcacctgaaatggattttaagtttgatatgatgtaggaattcattttaactttttttttttttttttttggccgggcatggtggctcatgcctgtaatcccagcactttaggaggccgaggtggatagatctcttgacgtcaggagttcgagaccagcctggccaacattacaaaatcccgtctgcattaaaaatacaaaaattagccaggcatagtggcgggcgcctgtaatcctggctactcgggaggcttaggcatgagaatcgcttgaacctgggaggcagaggttgcagtgagccaaggtcacgccattgcactccaacctgggtgatagagccagtcagtctcaaaaagaaaaaaaacaaaaacaacaacaaaaaaaacacttttttttttaatgaagatatcctatttcccagcatgtttatcaaaaatcccatcctttcccaatttctctgcaacgtcacctctcatatcaagtgttcatataagtgggtttgtttccatgggctatttgtctctgtaccaattcaacactgtctgcattatgtagctttataagaagtcttgatatctggtagggcaaccctccttttctcactgtttttcttcaagaatatcttggctattctttttcttttcaatttatataaggattttagaagcagcttgtcaagttacacaactgctgaggtttttattggaattgccttaatattatagatgaatatggggagaattggcagttttacaatgttgagccttccaggctatgcatgtggtttgagcacatctctgcttatttgtgtctcattaatgactctacatttctataatttttatccatagagtctgttgtagactgaataatgacttccaaagatatcaggtcctaaccctgggaccttgtaaatgttaccttatatggaaaagagtatttgcagatgtgattgagttaaggatcttgggatgcagaggttttcctggattatttgggtggggcctgtaggtatcattgtaagagggaggcagaaggagatttgacacaaagaggagaaggcacttaaccacagaggtagaaactggagggatgcagccacaagccaaggaatgccagcagccaccagaagctggaagggacaagaaagatttttcccatagagctgccataccagcatccactcagtcatactgacttcggacttctggtctccagaacaactgtgaaaggataaatctctgttgtttttaggtcaccaagttagtggtaacttgtttcagcagccacaggaaacaattcagaggctttgcacatctttcgttatatttattcctaggtatttgatattttctgttgttcttaaaatgatatatttttaaaagctgtttgttgctgttatggaaaatccagtgaaatttgctgtgttgatttttgtttgctgcaactttgctaaacttacttgttaattctaatggatttttctaggtatatactcatattacctgtgaataacagcacgtttgtttcttttcttctaatctttacgtatttttaaaaaattgctctacagtgctgcctagggcatccattacagtttgaactgaaatggtaatggaaacatctttgttttgtccctgatctcaaaggaaaggtttcaacattttatcattatatttactgtagacttttgtagatactctctatcaggttaagaacttttttcttcttcttcttggtttctaagaggtagggggttttttgtgtgttgcttttttgcttttgtttttgagcagggtcttgctctgtcactcaggctggagtgcagtggcgtgatcctggctcactgcaacctccacctccctggttcaagcgattctcatgcctcagcctcccaagtacctgtgatttcaggtgcctgccaccacgcctggctaatttttttgtatttttagtagagacagggtttcaccatgttggccaggctggttttgaactcctgagctcaggcagtctacccgcctcggcctcccagagtgctaggattacaggtgtgagccaccacgcctggccgaaacatcatctttagatctcatagttttattgtgtccattgtacaacctcaggcaagagtgtgcgggagccacgactctgtcttcctggagggggaaatgttcattgaaatttgttcaggaaccattttctctttatatatgtggacagagccactgaaatctattgtttgaaccttggtatgggagggagcactgtgtgctcacgcagacctggatctcagtgaaataataggggcaaaaggaccttgcatatagttgcttatatatttataacactttgaagaaagtaatgatgtaaaagtccagatttatgctaatattttgtttagcttctctttccctgctctgaggattggtgctagagctaaagagagagacatcattttctcagtgttatgtttggattgaaacaccaggataagccagtttgcccttatctgaaagtcattttgattcccgtctaccctgggttgagttagaaatgtgtgaaatgaatcctgagttgaggtgtgaaaaagcaaatgaagatcttacacacatattcattgaaagaatgtctataaaagggcttttaatgctgcaatataggtaacatgtgtaatacctgtaacatgtggaaggtaaaactcatcagaaatgtgaatgggaagtagaaaatcaagagacagagacagcattatttattctctattaaatgaagaactttaaaaacgttgaaaagtaagcaaaactatggccagccaagtaagagaagcagagaaataccaaaactgaccaaactcaataaataactttaacttggcttattgcaacatcacagtatctctgcaggtctggttccatatcaggctgtttccctaatgtatctctaggagaacatttcaagtcaaagacatactttatgctcagccataaatctcatgctttatatgcttgaaaataataaaagttctagagtcgagttaatttcacttctttcttttatattattaatgctcccatccttttggagattggaatgtggaatgcaatgtggcaaatattaaaaagtgggaaaagatgtaggaaaataatctgatgtcaattttcttttcccttggagtggagcaatcctttcccccagagctcaggcccagcttggcttctcggcagcctcaggcggccacacggagagggtggctctcccacctgccttcttgaatgggctctctcggatggagaggttggagaagggaccccacttggggctaagtggatacagatgtgcttggacatgtcggaatggggcggcctggccacccaaaagacttcttgtggggagggcctgaggagcttcctgcagggcagaaatgatgagtttgccctcagccacaggaggaagcttaatgcggagaagggccacctgccaccacttggactggccctgggatctgtggccgggatctttggttggccggggcatgtgagtaaactctaaggtcatctgctgacaatgcctgtgaggcagtgggcacagcggcctggtttggggcgtgtttcttgagtgtagcacaaagggaggcgaggggctctcctcggagcagcctcctcacccaccaccaagtgctttgacttccagggacagcacagaggtgatgcaggtcctatcgggccctgttgcggagacaagccgccctacgtctggcagtggatttgttcagggccacatccaggcacacgacccagaggactcagagacctcctaggaggcaaggcccttgcaagcaagtgggagaaacacctggagccaatgggatctgggttcctgtgggtcacatgttagtgtcatttcatcggccctgcaggcttgggaggcccaaggaaacttgggttacataaaaagggaaaagcatactgtagtttggcaaacaaaatgcgtctttgtgtgtgagagtgtgtgtgagagaaatgagctttcatttagaagcatcggcagcggttctaactggttcccaagtccttttaaaatgatattttctgagcctggaaaccaagcaggcagatcatggaattttggctggagatgtttttttaaaaatgtaggctagcaatgaaaaaggaggtggtaatttggctctgaggcctttacgggctgcagagcaaacccagcagggttaccatggcggcgcttctactgtttatataaa

SEQ ID NO: 156 - DNA, 4408 bp, Homo sapiens
cctggcctcgcgggccgtgtctccggcatcatgtgtggtatatttgcttacttaaactaccatgttcctcgaacgagacgagaaattcctggagaccctaatcaaaggcctcagagactggagtacagagctcatgatggtttaggtgtgggatttgatggaggcaatgataaagattgggaagccaatgcctgcaaaatccagcttattaagaagaaaggaaaagttaaggcactggatgaagaagttcacaagcaacaagatatggatttggatatagaatttgatgtacaccttggaatagctcatacccgttgggcaacacatggagaacccagtcctgtcaatagccacccccagcgctctgataaaaataatgaatttatcgttattcacaatggaatcatcaccaactacaaagacttgaaaaagtttttggaaagcaaaggctatgacttcgaatctgaaacagacacagagacaattgccaagctcgttaagtatatgtatgacaatcgggaaagtcaagataccagctttactaccttggtggagagagttatccaacaattggaaggtgcttttgcacttgtgtttaaaagtgttcattttcccgggcaagcagttggcacaaggcgaggtagccctctgttgattggtgtacggagtgaacataaactttctactgatcacattcctatactctacagaacaggcaaagacaagaaaggaagctgcaatctctctcgtgtggacagcacaacctgccttttcccggtggaagaaaaagcagtggagtattactttgcttctgatgcaagtgctgtcatagaacacaccaatcgcgtcatctttctggaagatgatgatgttgcagcagtagtggatggacgtctttctatccatcgaattaaacgaactgcaggagatcaccccggacgagctgtgcaaacactccagatggaactccagcagatcatgaagggcaacttcagttcatttatgcagaaggaaatatttgagcagccagagtctgtcgtgaacacaatgagaggaagagtcaactttgatgactatactgtgaatttgggtggtttgaaggatcacataaaggagatccagagatgccggcgtttgattcttattgcttgtggaacaagttaccatgctggtgtagcaacacgtcaagttcttgaggagctgactgagttgcctgtgatggtggaactagcaagtgacttcctggacagaaacacaccagtctttcgagatgatgtttgctttttccttagtcaatcaggtgagacagcagatactttgatgggtcttcgttactgtaaggagagaggagctttaactgtggggatcacaaacacagttggcagttccatatcacgggagacagattgtggagttcatattaatgctggtcctgagattggtgtggccagtacaaaggcttataccagccagtttgtatcccttgtgatgtttgcccttatgatgtgtgatgatcggatctccatgcaagaaagacgcaaagagatcatgcttggattgaaacggctgcctgatttgattaaggaagtactgagcatggatgacgaaattcagaaactagcaacagaactttatcatcagaagtcagttctgataatgggacgaggctatcattatgctacttgtcttgaaggggcactgaaaatcaaagaaattacttatatgcactctgaaggcatccttgctggtgaattgaaacatggccctctggctttggtggataaattgatgcctgtgatcatgatcatcatgagagatcacacttatgccaagtgtcagaatgctcttcagcaagtggttgctcggcaggggcggcctgtggtaatttgtgataaggaggatactgagaccattaagaacacaaaaagaacgatcaaggtgccccactcagtggactgcttgcagggcattctcagcgtgatccctttacagttgctggctttccaccttgctgtgctgagaggctatgatgttgatttcccacggaatcttgccaaatctgtgactgtagagtgaggaatatctatacaaaatgtacgaaactgtatgattaagcaacacaagacaccttttgtatttaaaaccttgatttaaaatatcaccccttgaagcctttttttagtaaatccttatttatatatcagttataattattccactcaatatgtgatttttgtgaagttacctcttacattttcccagtaatttgtggaggactttgaataatggaatctatattggaatctgtatcagaaagattctagctattattttctttaaagaatgctgggtgttgcatttctggaccctccacttcaatctgagaagacaatatgtttctaaaaattggtacttgtttcaccatacttcattcagaccagtgaaagagtagtgcatttaattggagtatctaaagccagtggcagtgtatgctcatacttggacagttagggaagggtttgccaagttttaagagaagatgtgatttattttgaaatttgtttctgttttgtttttaaatcaaactgtaaaacttaaaactgaaaaattttattggtaggatttatatctaagtttggttagccttagtttctcagacttgttgtctattatctgtaggtggaagaaatttaggaagcgaaatattacagtagtgcattggtgggtctcaatccttaacatatttgcacaattttatagcacaaactttaaattcaagctgctttggacaactgacaatatgattttaaatttgaagatgggatgtgtacatgttgggtatcctactactttgtgttttcatctcctaaaagtggtttttatttccttgtatctgtagtcttttattttttaaatgactgctgaatgacatattttatcttgttctttaaaatcacaacacagagctgctattaaattaatattgatatattcagtattctcttcaactttgtcacgaggaagaatttcctgtagttaattttaactttccttcattacattgttgcataaaactagtcccttagtgccagtttggaagttacttgcaattgtttggaagatttgcaggtcgctgacctcatcatttcactctaagtatatgtggtaggctaagctcagaaaaaggtatgtatgctttacactgataggcaccaaatttagtattgtatcctaagtatttttcctcttctgtattttctgtgctctacccctgaaatatatttaggaataaagaagatataaataaagtgatattggggtatgttcagcttgtaagtgtcagaaatggaagttgacaatttggattaaaatatttaaagtagaatgttattatttgatacccccaaaattgtgagtaataatttcttaatggagcttttctggccagatcttcagggctataggagagtgtgtttgtttttggtgaagtccttctttttcaaaggtttttacttttaaattgtgaagataagctatttagcacaattatttaagtaagctgttttttcctttcttttctttcttttcttgttttaacttctgggtgaggttaagattttctaatagttattgttgttgccagagaagcatagaattctgcttgtgtcttagggttagagaaagatttgttatattttgaggtaatttggaaggactttcatacatggtgactagaaacctgatctttttaagaataaaatagggtcactatttacattatatataatatatggctattatagctatattaatctactttaattgtttctaagattattttgtgtaagtcagctagcgtgtgtatagtgtcatttcttatgttttgtatattaacgttttacaaacacaatttgtgtgggtttgtagcatttcttatagtttaaagtatgattcagcattctaagttaaaactaatatgtgaagtcagtcattagtctgcataatctctgtctccctctgtgtgtgtctttctataaagcacatgtgtacacacacacacacaaatatactgaaagctagggtaagttctaaactgaatatcaaaaaccaaaatcaagaacaaagaagtgatattttccaaacaaacatggattctctgccgggtgcagtggctcagcctgtaataccagcctccactttgggagtctgaggtgggagtattgcttgagctcaagagttggagaacagcctgggcaacatggtgagacctggtctttacaaaaatttttttggccggacgcagtggctcacacctgtaatcccagcactttgggaggccgaggcaggttgatcatgaggtcaagagatcgagaccatcctggccaacatggtgaaaccccgtctttac

SEQ ID NO: 157 - protein, 681 aa, Homo sapiens [sequence omitted]

SEQ ID NO: 158 - DNA, 1021 bp, Homo sapiens
cctggcctcgcgggccgtgtctccggcatcatgtgtggtatatttgcttacttaaactaccatgttcctcgaacgagacgagaaattcctggagaccctaatcaaaggcctcagagactggagtacagaggtatttcttttaatccagatttatctcccaagctgtattctaggcctcctacaagtttcttcctagatagaccatgatattttaaactttgcatgttcaaaaattgaactgaggccgggcgtggtgactcacgcctgtaatcccagcactttgggaggctgaggtggatggatcacttgaggtgtgggatttgatggaggcaatgataaagattgggaagccaatgcctgcaaaatccagcttattaagaagaaaggaaaagttaaggcactggatgaagaagttcacaagcaacaagatatggatttggatatagaatttgatgtacaccttggaatagctcatacccgttgggcaacacatggagaacccagtcctgtcaatagccacccccagcgctctgataaaaataatgaatttatcgttattcacaatggaatcatcaccaactacaaagacttgaaaaagtttttggaaagcaaaggctatgacttcgaatctgaaacagacacagagacaattgccaagctcgttaagtatatgtatgacaatcgggaaagtcaagataccagctttactaccttggtggagagagttatccaacaattggaaggtgcttttgcacttgtgtttaaaagtgttcattttcccgggcaagcagttggcacaaggcgaggtagccctctgttgattggtgtacggagtgaacataaactttctactgatcacattcctatactctacagaacagctaggactcagattggatcaaaattcacacggtggggatcacagggagaaagaggcaaagacaagaaaggaagctgcaatctctctcgtgtggacagcacaacctgccttttcccggtggaagaaaaagcagtggagtat

SEQ ID NO: 159 - protein, 196 aa, Homo sapiens
MDLDIEFDVHLGIAHTRWATHGEPSPVNSHPQRSDKNNEFIVIHNGIITNYKDLKKFLESKGYDFESETDTETIAKLVKYMYDNRESQDTSFTTLVERVIQQLEGAFALVFKSVHFPGQAVGTRRGSPLLIGVRSEHKLSTDHIPILYRTARTQIGSKFTRWGSQGERGKDKKGSCNLSRVDSTTCLFPVEEKAVE

SEQ ID NO: 160 - DNA, 937 bp, Homo sapiens
cctggcctcgcgggccgtgtctccggcatcatgtgtggtatatttgcttacttaaactaccatgttcctcgaacgagacgagaaattcctggagaccctaatcaaaggcctcagagactggagtacagaggtatttcttttaatccagatttatctcccaagctgtattctaggcctcctacaagtttcttcctagatagaccatgatattttaaactttgcatgttcaaaaattgaactgaggccgggcgtggtgactcacgcctgtaatcccagcactttgggaggctgaggtggatggatcacttgaggtgtgggatttgatggaggcaatgataaagattgggaagccaatgcctgcaaaatccagcttattaagaagaaaggaaaagttaaggcactggatgaagaagttcacaagcaacaagatatggatttggatatagaatttgatgtacaccttggaatagctcatacccgttgggcaacacatggagaacccagtcctgtcaatagccacccccagcgctctgataaaaataatgaatttatcgttattcacaatggaatcatcaccaactacaaagacttgaaaaagtttttggaaagcaaaggctatgacttcgaatctgaaacagacacagagacaattgccaagctcgttaagtatatgtatgacaatcgggaaagtcaagataccagctttactaccttggtggagagagttatccaacaattggaaggtgcttttgcacttgtgtttaaaagtgttcattttcccgggcaagcagttggcacaaggcgaggtagccctctgttgattggtgtacggagtgaacataaactttctactgatcacattcctatactctacagaacagctaggactcagattggatcaaaattcacacggtggggatcacagggagaaagaggt

SEQ ID NO: 161 - protein, 169 aa, Homo sapiens
MDLDIEFDVHLGIAHTRWATHGEPSPVNSHPQRSDKNNEFIVIHNGIITNYKDLKKFLESKGYDFESETDTETIAKLVKYMYDNRESQDTSFTTLVERVIQQLEGAFALVFKSVHFPGQAVGTRRGSPLLIGVRSEHKLSTDHIPILYRTARTQIGSKFTRWGSQGERG

SEQ ID NO: 162 - DNA, 4734 bp, Homo sapiens
cctggcctcgcgggccgtgtctccggcatcatgtgtggtatatttgcttacttaaactaccatgttcctcgaacgagacgagaaattcctggagaccctaatcaaaggcctcagagactggagtacagagctcatgatggtttaggtgtgggatttgatggaggcaatgataaagattgggaagccaatgcctgcaaaatccagcttattaagaagaaaggaaaagttaaggcactggatgaagaagttcacaagcaacaagatatggatttggatatagaatttgatgtacaccttggaatagctcatacccgttgggcaacacatggagaacccagtcctgtcaatagccacccccagcgctctgataaaaataatgaatttatcgttattcacaatggaatcatcaccaactacaaagacttgaaaaagtttttggaaagcaaaggctatgacttcgaatctgaaacagacacagagacaattgccaagctcgttaagtatatgtatgacaatcgggaaagtcaagataccagctttactaccttggtggagagagttatccaacaattggaaggtgcttttgcacttgtgtttaaaagtgttcattttcccgggcaagcagttggcacaaggcgaggtagccctctgttgattggtgtacggagtgaacataaactttctactgatcacattcctatactctacagaacaggcaaagacaagaaaggaagctgcaatctctctcgtgtggacagcacaacctgccttttcccggtggaagaaaaagcagtggagtattactttgcttctgatgcaagtgctgtcatagaacacaccaatcgcgtcatctttctggaagatgatgatgttgcagcagtagtggatggacgtctttctatccatcgaattaaacgaactgcaggagatcaccccggacgagctgtgcaaacactccagatggaactccagcagatcatgaagggcaacttcagttcatttatgcagaaggaaatatttgagcagccagagtctgtcgtgaacacaatgagaggaagagtcaactttgatgactatactgtgaatttgggtggtttgaaggatcacataaaggagatccagagatgccggcgtttgattcttattgcttgtggaacaagttaccatgctggtgtagcaacacgtcaagttcttgaggagctgactgagttgcctgtgatggtggaactagcaagtgacttcctggacagaaacacaccagtctttcgagatgatgtttgctttttccttagtcaatcaggtgagacagcagatactttgatgggtcttcgttactgtaaggagagaggagctttaactgtggggatcacaaacacagttggcagttccatatcacgggagacagattgtggagttcatattaatgctggtcctgagattggtgtggccagtacaaaggcttataccagccagtttgtatcccttgtgatgtttgcccttatgatgtgtgatgatcggatctccatgcaagaaagacgcaaagagatcatgcttggattgaaacggctgcctgatttgattaaggaagtactgagcatggatgacgaaattcagaaactagcaacagaactttatcatcagaagtcagttctgataatgggacgaggctatcattatgctacttgtcttgaaggggcactgaaaatcaaagaaattacttatatgcactctgaaggcatccttctgtgctgagaggctatgatgttgatttcccacggaatcttgccaaatctgtgactgtagagtgaggaatatctatacaaaatgtacgaaactgtatgattaagcaacacaagacaccttttgtatttaaaaccttgatttaaaatatcaccccttgaagcctttttttagtaaatccttatttatatatcagttataattattccactcaatatgtgatttttgtgaagttacctcttacattttcccagtaatttgtggaggactttgaataatggaatctatattggaatctgtatcagaaagattctagctattattttctttaaagaatgctgggtgttgcatttctggaccctccacttcaatctgagaagacaatatgtttctaaaaattggtacttgtttcaccatacttcattcagaccagtgaaagagtagtgcatttaattggagtatctaaagccagtggcagtgtatgctcatacttggacagttagggaagggtttgccaagttttaagagaagatgtgatttattttgaaatttgtttctgttttgtttttaaatcaaactgtaaaacttaaaactgaaaaattttattggtaggatttatatctaagtttggttagccttagtttctcagacttgttgtctattatctgtaggtggaagaaatttaggaagcgaaatattacagtagtgcattggtgggtctcaatccttaacatatttgcacaattttatagcacaaactttaaattcaagctgctttggacaactgacaatatgattttaaatttgaagatgggatgtgtacatgttgggtatcctactactttgtgttttcatctcctaaaagtggtttttatttccttgtatctgtagtcttttattttttaaatgactgctgaatgacatattttatcttgttctttaaaatcacaacacagagctgctattaaattaatattgatatattcagtattctcttcaactttgtcacgaggaagaatttcctgtagttaattttaactttccttcattacattgttgcataaaactagtcccttagtgccagtttggaagttacttgcaattgtttggaagatttgcaggtcgctgacctcatcatttcactctaagtatatgtggtaggctaagctcagaaaaaggtatgtatgctttacactgataggcaccaaatttagtattgtatcctaagtatttttcctcttctgtattttctgtgctctacccctgaaatatatttaggaataaagaagatataaataaagtgatattggggtatgttcagcttgtaagtgtcagaaatggaagttgacaatttggattaaaatatttaaagtagaatgttattatttgatacccccaaaattgtgagtaataatttcttaatggagcttttctggccagatcttcagggctataggagagtgtgtttgtttttggtgaagtccttctttttcaaaggtttttacttttaaattgtgaagataagctatttagcacaattatttaagtaagctgttttttcctttcttttctttcttttcttgttttaacttctgggtgaggttaagattttctaatagttattgttgttgccagagaagcatagaattctgcttgtgtcttagggttagagaaagatttgttatattttgaggtaatttggaaggactttcatacatggtgactagaaacctgatctttttaagaataaaatagggtcactatttacattatatataatatatggctattatagctatattaatctactttaattgtttctaagattattttgtgtaagtcagctagcgtgtgtatagtgtcatttcttatgttttgtatattaacgttttacaaacacaatttgtgtgggtttgtagcatttcttatagtttaaagtatgattcagcattctaagttaaaactaatatgtgaagtcagtcattagtctgcataatctctgtctccctctgtgtgtgtctttctataaagcacatgtgtacacacacacacacaaatatactgaaagctagggtaagttctaaactgaatatcaaaaaccaaaatcaagaacaaagaagtgatattttccaaacaaacatggattctctgccgggtgcagtggctcagcctgtaataccagcctccactttgggagtctgaggtgggagtattgcttgagctcaagagttggagaacatgctgggattacaggcatgagtcaccgtgtcctgcccagacatatcaaatttgacaggtattgtataccctttggatctttaggaattaatttttgcctctgtcactcagctttgtatattttgaaatggagataagtatagggaggtcttggaaggaaaattgccagaattcccaaaccatgtaacactcattgagaattccagatccattatatctaaagggcaagtgaaggaaacagtattgtgaactgggtataactccttggttcttaactagtacattcttaatctgtgagacccaaaggttgataaacaataatttaagattgtacagtactctaaacgtctgcaaaggtctagatgttatcagtatcactagtttttatttctgccagtagctcccttttaggttacattgttgtcctctttccagtgtcgcatctgtcattggtttttcactatggcaagttcattaaaaagcttgctccattgttatcttcaagtaatgcccataaggagatggaagatatctgagacaattaaggctttagcttctaggcaagagaaataacgttgcattaaatttcaagtttctttctgctagacttgaatgtgtctagccactctaatttatgggggcttttggttttttcctattgtactttgtatgtagaattgttttgaaatatcaagcatatttactttgaatttgaactctttcttaattttgtatttatcctttgaataaaatgta

SEQ ID NO: 163 - protein, 573 aa, Homo sapiens [sequence omitted]

SEQ ID NO: 164 - DNA, 149041 bp, Mus musculus
  misc_feature (1)...(149041): n = A,T,C or G
accgggtcggtgctggcgggtctgccacttggttggcagttggtccttgggccagtggcctgtcactgggttctccgctcttatgttggaaagtgtgagggacacaggagcgacctgcatacctgagcctccgagagagaagctgcactctggcatccaggtcagtgggtctccctgcctcggctcaccgctatcccgggaactgagtacccccagatccaagaactacatgggtagttgggcgtctgtggtcttttagaccttcgaacgttttcaagacttggggacccacttatttgtctgggagactgagaaaagggagcaactcccctggatttgcttgagttttctacccgacctcgctctggatgtgccacctgccccgcgcttctacaggtggcagagtggtccccaggataccggggtgttccgatatctcagagttccgggcgattttgacccaagccttgagtcccgtgagggcagcagtggcatcaactggagatacctaggtgggtttgttccatagacctttggtccagagcgctttggccaggagcagttctgtgcactaattgctaaatgcaacacacttcccaaaggctcaaggcaggattagggtgtggggatgcttctgtttttaaaagtgggtcctcttccctccttccatcctgacgccagacccatacttttccctccgatcaaaataaggttattatatgtttaaaaactagaacttccaaggttccggtaggattcaaataggcattcagctctttcttagagcactgagatatttgatatagatcagtcttcctcttcatattttggttttatttctgcctgtgttcatttctcttggtccttaattgattatattgtagactgtagtgtttattagattaccgagtattttgttaaggtaaatgctcaactacaggaaggaagtcaattacagacctaattaatcttcagtcttagattactattggtatactaaacatgttatctgattagaaattatttctttcttcaccagcccgtttgtatgcatatttacgtgactttgaagtggaatattgttaagtcttttgttgttattttcatttgggattttatttaaggctgatggtgatgggaactggtgatctcatttagacccttgtgaatgcttagctaggcaagtgctctaccactgagcaacaacactcagccctcacataatatattagtggtatcactctgaggtttgatgatgtgccgattttagtttattgctactattgtctgtgttttggtaactaaggcagatatgctaagtggatggataacataagagatacatgtaagagataaagacagatgaaggttggaacaaacttacagaaattctaggggtttgtttgttttttttcaccagaataaggaaaatctgggtaggttttaagaaggatcaatctatatgagggatgtcacaggaagatgttagcggtgacctgggccatggagaggtctataaggcaaactcagtctataagaaatggctactggtccttcttggttcctggcctgattggtagacagaacaaaataacaacaaaaccaatggtcccagctggcccaaggccacagacttcaatgtatgggatattaagcagagactgactgtggtctgctgagcttatcaaagttagagtccttgaactttgacctgcccaacccccagcctgacagaaatctagtaaacatttgtggagagaaaggtcagctgacattttagagccctgtgcttcagacacaagcttgagaatcaagagatgatcttcaaaagtagatttttgacactgtgggtcaggggtgaagtctggcattctgtatttctaacctatttctttcttgtttgtatcaagtattaagagtgatgtacaaactctccgaaggcctcggagttttgcaaactcttcaggttaagtaggtcccaggcatgtttggcattctccaggtgtttctaataacagccgggtgggatccactattggacttggtagcgcctgaaggaccacagctggaaggccagttaggagactggcaggccaattcagataattatgaggagagtgaagtgtgagtagacaaaagagaccctagaaataccagggccaggaaaagggaggtgtcagcctttatactggttagtcagaataagactctaggaaaaggaacagttcttggagaattctagttcaattttggatgcactacttcgacaatactggtcagcagctaatttgtgtgtgtccataagtttgtgtggggatggtttctcctgaaatacagatctatttatgattcattactgtttcaaatcccctggtgagggagaaagaatgaatatataggtgacatgttttaaacgttaagacctataaagtgtgtgactccatataagatatgacggtcacccctttgtgcacaaaagtaaagctaaaactctgggcttggattctcctgagtcactggttttcttgcttcctccttcctcttaggagttccacttcctttaccctttgctaccctagaatttcgttttgtttgtgcttgaaggcacctatgtgtgtttatttttagagtctcgggaaggtgagctctgtctcgtataaactctgaagcggcagtctgttgcgtctagtggttctcttcagggactgttattatctctaatacttgtgataaaaagccttgtaggagatgggtaccctaaattaagctgatgagctttctgtggagacttccagaaggccccagacttctagaggcgttctgactcagctttgtctccagcaagctgaaaatttctctgtgctttaatgtccttggtttggtgctccttcataagtaattcttgctttcctctcctctgtgcctctgtgcacacttatgcacatgagagctaagcatccagtgtgtatgatgcttcttattacggtccatgttgtactgtagttttggcatgcaatatgtacatgtctgtaacacgtctgtagacacaggtgggataaggctgcctctctgataagataatctttaatatccttgtgacattttttggccaattcattttctaactccatcaccactgctccttgaactgaggagtgttctgcctgtccttttgtgcctctctgaggatgtatgcttcttggattataatggttggacattgctttttgcttggtcatgaatctgaaatacaaatctgtttatgctctttttctgcttaaaaacccctggtgaatccctcaatgcagaacacgagaagagcgaatacaaacagaaagatgcaaaattcaaatgttgattacgccctgtagattgtgtgcccctacgcaagacatgacgctcatcactgtttcctctttccgagggtacctgttgcctctgctttgtagcagggatgagaaccctagagccccctcatttcaagccatttcactctctccactaataccatatgtgaattacaatagaatcttctctctgctgcgttcgtcctgcctctgtattcatactctgagcagctgtagctacactaggtctcctgtgagacctaatacttaacagatatcagctagagtttcccatgcatgtgggtcccgtgttggctggcaggttttgcttctgtaagaagggaaaggaacaggttgttttgtgtgagagaagggaaggaatgggaacagaagccaaaagacaggaagggcaggctcaaggaagaatggctcaatggctagaattatggggtgtggtagggtattgtatgactttcctggggagacatgaacagaagtctactcaacacagataagacactgatgacacactaaagaagtgattccacccaagcctagcttggagaaccaatgaatttatgaggggttactgacaggagtgtgggtgactttaggacagcccttagtgtgggtgagaacataggagaactgtacctctagagctctttgctcatcttgcaggcaacatgaccagatatctctcttctccagcagttatttactgctttcataacttagggagggcccttgtgagtcttgtaacttcccaactaactgagactccctagtgccccctaggtaagtttcaggggcttcctactttgtgtgagtttacctgctccctccaggaggaagtgtttagattttgtggaaatacataatggggatgtttgaagaggaacatctggaaaccagggagggaaatgatggtggaaggtcctgaaggttggagctaaagcatacaaattttgacctctgtggtaatacatatatatactaaaagctcagctacttagcaacacggtaaaaacttatttaaaaagaaaaaaagaagtgtactttttttttttttgtactgatgacattgaaagctatgagtaatatggaaaaggctctgtgcaattttgttttcaggaggctgctaggctgggaagggtaggttagagggaccacacaaggacatgttattggagtaatccataggacaatcttaggtcctgaatcaaggcagtgacaatagcaacgaagtgagcttgccaggataagactgattgggtttgagggagagaaaaagtcatactagaaactgactggcagagaatgaggtgactgtgagtaggtatgggaccatggaggacttccttagaggacagaagggaaagaccatggcgacacattttaaaatcaggagaatcttgggtagcttcttgcttgccctttatgattttacccaacacaatggcaaaacccaaagcagtgcaccccaagtcaccccattcttaggtgcagatccaggccaactagcctcctggcttccatcatatcatcggtagcccatgtttatgggccagaggagagctgccagaaggtctagttggagataacattagccaatgagaacaggcatttgatcaccttggggcattcagtgtgtagaacagaacagggaagctagagccttacagctcaggtattcagggcaagtgttgggtggcagccggtgcctgaaggccctgtttgtttgtttgtttgtttacttatttatctggttctgaggacttttcataggtggggctgttaggtagagaagtactttttatggtatctgaactctgtattctcaatatgctctgtgtgcatactcgggggcttttgtggagtataactattagccaatttaccaattcattggaaatgtatattctaaggatctaacactctcttctctcccagacaaactttggggacacattcaacattctataggatgttactactatagcgatgaataatgagagaaagaaggggaaggtgctggggacagcaaaccagtcctcaggactttctgtcctcggaatggtgaggattgtgatgactgcatgatgggtgggaagaagaccttatctggtagctgtgagagactccgtgagcctcttcctcacaccccttctgcacttctctgatcagccaggcttcccagctgctggcctcccatggcaggcttgcctttgtcatggacttcaggacagagggcacttccatctgcgaaggcagagctaggtaggttaatatgtgtgaaacgactggactttatctcttggcatgtgggagctggcaaacccaaatggtaattctcctgtgctgggaattgcctttgaaggtgaacttgtctagctaccctggctttttcttgcctgtttccacctccatcttggttgagttagtatccttgtgctgtcatcctaatgacagtgtaagtatgtgcttgagcctcctcacccatggcaaagtagctgggacagtcatctacagcagacttgggttgcccaaggcttaggaatgacttcgtacaggtgaggtgggaggagaaccattagcaaagattagctacttctggtgactttggaatgtttggctcttcctccttgtggaattctctaggggcttctctgggagtgtgaccatcctttcccagagataaagattccaaagaggaggtggttatctaaatcctggaatttctttcttcctggggaggcgtagagccctgttaactgcctgagggtgtttaccttttttttttttttttttttttttttaaaccaggaatactcagaatgcttccctctccagggtgaagctgtcatttcacagtacaagctggagtgggttagtcaaatgcagctgagcatctcaggctgggcaaggaccctctgagctagagggctgctcctgtgactgaacaaggtgtcccaagaagtcatcactttctcctcctccttcagtattttattttttaaattatgtgtatacacgtggggtatgtgcatatgaggttaagtgccctcagaggtcactggtgtcaggttccccaggcgttaaagtgaatgaccgttttgaaggctgggaattgaactcaggtcctctgcaaaagcagcatatgctctttactgttgagtcatctcttctacctaccaagggtccttaccaaatgtctccagcctgcttttggtagaaagacccagcagtaaggagttggtaagagcaactctttagttgatagttgataattgtgtgtgtgtgtgtgtgtgtgtgtgtgtgagagagagagttgtagaggaacctagagggaaagaaaggacaggaaacaggaaagttccacaactcagcaccacatttcccttaaacaaaggaggctttttcatgaagatctatcttggcactggactgcttactagagtaatagtggtctaatggagtaaagaggtaaaatggaatgttccatttgatatgtttgacaaagggcttatctcatgaggcacaggtagtgagtgctggtcagttttgtgggaaacaccccgggatgggttctaactcaggattaccacctagtccccatctctgtgaaacagggttttgaaggttctagggtacaagatttaattttatatattgcaacatgaataatttgtctgtgtgttcatgtgtgtgcaggtgtatgtagaggccagaggtcaatcttgggtttctttccataggagctatccagtttgtcttttttgccaggtgtggcggtatttccctttaatactaacacttttgttttgagacaaggtatctccctgatacccttgtactgcttaggctaggctggctgggcagcaagccccagggatcctcttgtctttgcttcctagctttggtattactagtgcagcacaacacccagcgtggcaggactgcctcaggcatgctgggttgtgagtggcatcaaacttatcccatcaggcagcaagtggggggagagtacatcggcataccaagagaagttaaattgttatttaaggaagaaatggcacgttttgctccctcagcattttatcagagcaaaggagtagttcttggctctgactcctgaccttcattggatgtcatgaaaaggctttattacataagctcttcctgcaccccgccaagacatctggttcttcgatgcaacactgcttacctggtaacagcaacaacatccccatgtgtctgtctaggttttcattgtgccagctcactggtgcagacaatgccccgggcgcagattattgtcctgcttcagcagaggaggaaaccgactcctcctgctctccccaccccaccgccattcatttatggcaggcagctggttttctccatcttgaaggcttgacctgcctaacccttgagggccttggcagctctaagctgccactttgaatcaaacaggttcaaggctgcaactttgagtaagtctgagttttcaggtttctcatttgttcattggcttaatgctcactgaggcccgcttcacttggttgttgtgaagattagatgaaatgatgcggtcatcgttggctagagtgcatgcttggcatggtgcaggcagtcagtaatggtattatcattattttttcctttctcaagaagcctgagaaaaacattttgtcagaaggagtggttcacattatgaagaaccctcgcagtttccctcctgaggctgaaggttcaagagtgaagtggcaggtgtgccgtagaaaggacagccgtggtgcaggggggcagaaagtccaggaggagagtgacagtcgagtctgtagtaggtcagtttcagatagctggtcagcaaggaaggtacacagagctcagctaggggagttagtcgtggcagggtcagggcaaagccctgtccataggctcccagaatcagtttgtgtgtggtgatgatctaggagaaaatgaacatgtcatgtaaattttcttagcttggcttcattaatagaactagagaggagctttccttgaatttaccaaacgtgtcacatggagacaagttgaaggaggaacccacccgtgaatgttgcaaaattagtgttcttgtcacgcaagctgagaagagacaggaaggcgtagagatggtggtgaatgagctaccatgtgttgcccagacttgcgtctttctcctgggcagctggaggctttgctgtgagggaagagacaatacagggctccttggtcaattagatgccatgagttaagagaacaggaggctagccaggtgatggtgccccacgcctttaatctcagcactcaggaggtagaggcacgaggatcactgtgagtttgaagccagcctggtctacagagctgctagttccaggacaaccaggctgtgtagaaaaaccctgtctccaaaaggaaaatacaaaaacaaaacaacaacacacatacacacacacagagacacccaaaacaaaacaaaacaccccaaaagaacatcggaggcataattgagaaaactgggttcaagaaataaggaggaaacccccccattgctaaaaatggaacaaagaatctgggtttgatggcttgtacctgtaatcccagtactcaggaggctgaggcaggaggatcactgtgagtttggagtcctcttgggctatagagggagactctgtctcataaaacaagttgaacaaagagtccgggattgtggagtggggtgggagttatgggttggacttactagggtgggaaaagctaatggttctgagcaaagacagcaaggagagtagaaaaggggagtcttcaagtcacaggctgatggatcgggagagtagaaagcctctgaggaaatgccttgtgggctgatgctctaaaggcaggatccccaagacataagtatcatgtatcatctttgctgattccatccatggcctcaccatgactaggttctgaatgctcttccagacccagagtcagtcttcctgtgaagattgtaaaaacatgatgtcctgtgacttggagaaccatggcatttggtctgaggtgttagtctcccagcatccaactaagtatataataggtgtagaagggaaaaggacaatgtgacccgagaccctggactcccaggtaatgctgagtatagaaaggccctagtaaccacactgagaaatctgacttaatgcagcctagaccacagtgaggtttcatccccaggcacaggcagggaagggcagtggtcactgaggccctggacaagtaggctgaggctttgggtggggtgtgctgtatggtttgactttgggtggggagtgctgtggttaaggaatgcggatgcccgagggccatgatagcctggtctggagggcagggagggaacatggctcaaagtaggatctaccaggtctaggaaaacattttcaggaatagaggtagactattaattcctaggtcctctagccacgttatttcagtcgctagataattttcataccattctctgcaggcatagtgggagctctagctgagtgggccgtgccccctgcctgagtgggatttaagagctggaatttaagtgtgtagaaaacagccagcggttgggttgaccaaggagtcaacaagggtagagcaccagagatggagcgtgatcattaataaggacccaccatgccagaggagctaagggcaggatttgtgcttacttaaacctcactggctgcctcttaagactgagggcttcaggagactgtctgtgacaggacatgtgaccttcccgaggcgacctaactggtgagtgactggcaacacatttctgtttggttgtcctaaccctaaatgtatattgtttctaccttgccaccacatttagagttcagagtaagtagtcgattctactgaagatccttttttccttcatggtgacaacgcaggaaaatggtcaagtcggcaggtgcctttggaggaggaacttggcagacgtggctaggttgtcataaagcatattgtagttctagttagtagcagagctcaaaaattgtaacacatagctgttcttttcttttgctaaaaaaaaaaaagtgtgtgcgtgtgtctgtctatgtgtgtgcacacttgtatatggataagtgtttgcatgcatgatatgtatgtatgtgcacggcatgtgtgcctgccttgtgccttttgagcccagaagagggcttcagatctcctggaactagagttattaggggtccggatgggaggctacgagctaccatgtaggtgctgcaagtcaaatccaaatttgttcaacaagacaaatgcagactctgatctagggagaaattgcttgctcttctccttctcctccttctcctccttctcctccccctccttcttcctcttccgcccctcctctccctctcccccacttcccctctccccctccctctacgcaagagagacaggtactgctgagccatctctccagtccctatactgctgggatttttgtttgtttgtttttgtttcagacagggtttccctgtatagccctggctgtcctggaactcactctgtagacccggctggcctcaaactcagaaatctgcttacctctgcctcccaaatgctgggattaaaggcttgcaccaccactgcctggctatactgctggtttttaaaggtattggagaaactattaatcccttactgctataggttaatttctgaattctgaaattactccaatttcccccattcaagaaaatgttaaaacaaggcgtgactctgattgtctcagtgaatacaaaaggagtcttagctttagctaagcacttagctaacttcattagtcacggtcagttgcaacaactccatcattttaggaccttgagatgtttggcatagtggtgttcaggagtgggctggaagggcatagtaagggatgagagtcagggcaacctgggcagtaacccaggtgaagctgtgggggtggagaagcgtggccgatgcagtgtggtaaagcacttgcccagagcttgcccaagcagagatttggagtgggcgctaggatccccgcatgaaagggcaacattgttcccatgcacggcatgttcaagctctgaacaggtgggtgctgatgggagctgtctgttcaagtcagggatctttctgattctgtttgttggagagcctgctggtcattatcactaagtaggtgtaccctggtctccatcctctatcaggcttgatgtgcctcctgcagcttaggacccagccctagtcctagagggcattctttgttctatcttctctgtgagcctgggaaagctatccatcagctcagaaaatttgagaagatcagctgtagaggctgtaaaaacagtgactcttcgtatggagaagatttgggagtatctaggctgcaatgccctatgatctcatgttaacaggctacatcttggggagggagagtctctacctccgtgtcccaccttccaagttggagcactttaaaattgttgagggttgctctactatcacaatccagcactcaagagtcaggccacctgcatttgaaagacagttttagataaagtgacaattgaatgaggaatggtgttgatgaagagagttctttaaaggtacatgagaaaggtatactgttacatcactgttatgtgccacatgtcttcccaactcctggactgattcctgctttggtactggtgtctcccagagtctggcatctactaagaacatgatgagagatggctcagtggttaagagcattgactgctcttctgaaggtcctgagtttaagtcccagcaaccacatggtggctcacaaccatctgtcatgagatctgatgccctcttctggggtgtctgaagatagctacattgtacttatatataatcaataaataaatctaaaaaaaaaagaacatgatgaggcttctctaggatattggttccacttgtctgtcttccctcagagtcatcactggacttgatacaggcagtcttgataccagaggaaaggacagaggtggtcctcctgctgcttcaagatgaatgctagctgtgactgtgatcagaacttggtcatttccccacagaaatccacagagcccagcttctgcttttgcttccatgatgggtacctcccagatcatttcccctggttgtgacttctgtgtcacgtcagtacccaactggcttctgagcatcatagacttggcctgcttactttccctgagcagagttacctgttaaatctctgggtgaatggctgagcaaagagcccaggactgcagcagtggacatgtggtcaataaggaactaacagctctgaccaggcagtggtggcgcacacctttaatgccagcacttgggaggcagaggcagatggatttttgagttcgaggccagcctggtctatagagtgagttccaggacagccaaggctacacagagaaaccctgcctcgaaccccccaccccctatacacaaaaggaactttcagctcaggaaggccatggccttgctgtttttttggttttttttgtttttgttttttgtttttgtcagatactgcttagagagacccagaaaactcaggatacatgtacagagtttgagctttgagctctggtaccctcagtgggagtcaggatacaccttgactctctgatgtgctccctgagtgaggtgagacagggtgttgcagatttactgggctaggcactgagtctgagtggtttattctgtcctctttcttatcacactgtccaactttgtgtgaagcaggtataataacaggcccagtatacaataatctgagaggttaatgtgtattacttacagtaagaaccaaacaaaactgagcacaactagcatttgattacttacccatccaattttgctatgacctgaatatgttcccctcatccacattaatttcttgaaatcctaccccttgaggtaatggtataaagtagggctctaagagatgattagatgttgaagttgtgccctcttgaccaggactagtccccattaaaaaggcctgaaaagggatgctgaaacaggaaatgggcctttactagacaccaaatcttccttgtcttgtaatccccatcttcagactattagaaacacatctgcgtcatttataagctacctgttcaatatatgcaatatatggtgacactgccatagtgactcagacaaggcagagttgggctcctgccgctctaccctgtccctcttattccgggggagggaaagcccaactttaccaggtaataaagggatttcgaaaggctgtgcatcaggcggagtggtttatgggaacctggaatttgtatgtctttgccttggtccttttgaatcaaatcatagggacctcagtaccttcgacttcttcctttgactccgaggaactgttggtgtgtccccactacgccaaaagccctgttatgtgagagaagaggcaaagaaaagtggaggttgcaaacatttttatttccctgtgaagagtgagattatgtgggcccacaagagagggggatacccatgcagtgtctcgctcctgcagtcttgtgttggttagttttatcaactctccatcaactagacttacgtgggaagagggaaccttggctgaggaattgcctctatcagttttgtctgtgagtcattttcttaattgttaattaatgtagaaggacctggcccactgtaggcagtgccatccctaggcagaaaggtagctgagcaaaccatgggagcaagccagtaagcagcatccctccacggactctgcttctatccatgcctccaggttcctgccttgctttttctctgtgatggaatcaacctcccagttgctttatgacagtgtttatcatagcaatagaaacctgattagcacagcctttttttggtctttttttggtttccccctatttgtgggaaagtccctaaattaccctctggcctaagaactcacaggcaggaaagtgatctaagtgacaagtatcttgtgactggccctctaaggttaggggacagtccctgctccagctctccctgcccatttcatatgcgggagctgttgcattgctttgaagagggttgagcccaaggttgttagttggttgatagctgctatttctgtaggtctaatggtttcctccttgatgcaacctcatctgtcctcatgtcatggttttagtccctaggtacaattcaccaaagagctgacttacaaataatatagatagataaatgttaagaaatgcttgcacttgaatatttaatgtgtggatgtgaatcagagctctcccttggactgagagagggggaaacaccttggagtaggataataaagtcaccagttgcagggaggctatagctttcttcacatgggctttactgactatgtgtcttagttagggtttcattgctgtgaaaggacaacatgaccaaggcaactcggaagtggaaacttatggattctttggaaagccagttgtgttggatattttgattggaaagtctgtggtgtcggatgatgttttgctaaagcagacaggtgaaggaacgttttgctgtagcagacacaggtgaaagaatgttttgctaaagcaagcacgttaaaggacaagtgataaactaggccgtggtggtgcacgcctttaatcccagcactcgggaggcagaggcaggcagatttctgagttcgaggccagcctggtctacagagtgagttccaggacagccagggctatatagagaaaccctgtctcgaaaaaccaaaaaacccccaaaaaaaggacaagtgacaaaggacttttcactaacaacacataagtattggtccatcatacattgagtagttgagcttcatttgtcatgactctgtagagagaaacccaccaaaaaacttctggtggtgtgctgtggcttcttgacacttctggggctgattggcagagtgatgtcagctgatacagatgcatgtgctgaggcaagacacttggtaaggaaagaccagtggaggacacacgatgtttgaagggagtataaataggactcaacagcctgtgagaggggcttgcttgtagagctagctgtgtagtgcttcttggtcttgtctcttggctgatctttgattagttgagagaggcacagctgagaacttctgacgttccttttggttctggtcccttctgctgactcatgctgattctgcaaaggcctggctatctctgctaggtcatgctgatttgtgctgctatcccgactctatcaaactggactgctgatatatttgtgaagtgcgagtggattgaactgccactgatgacctgtaaactgaactactggtttcctaatagtgcagatgaaacttgcttcgaaaaccaatttctaaacagatccacatctcccatatcctttcttttctactgcctctggtgagtgatgggctagaagggaggttaaagcatttaagaaccatcattcaaagtaggcgttaaaaaattaaagttccacaactcttataaaggaaagtatttaattggggctggcttacagtttcagagattcagttcattatcaccatggtgggaagcatggcactgtgtaggcagacatggtgctggaggagctgagagttctacatcttttgtttttatttttttttttttttggttttcgagacagggtttctctgtgtagccctggctgtccgggaactcactttgtagaccaggctggcctcaaactcagaaatacgcctgcctctgcctcccaagtgctgggattaaaggcgtgtgccacaacacctggctgagagttctacatcttgatctgcaggcaggcagaggaaatgcaggcagtggaaagggtaggcagcagaagggaactatcttctgtactgagtgcctgagcataggagacctcaaagtccacctacacagtgacacacttcctccaaggctacaccttctccacaaaggccatacctcctaatagtgacattccctatggccaagcattcaaatacatgagtctgtgggggccaaacctattaagtccacaacaacacatatctgagatcaaaggagagtgttgctttggctgctacaactaggtatgggaaatcagaggcttcgggtgatagtttatgtcatagttttggatgctaaaagttcaagagcacatggctggcaaggttggttcttgtgggccctctctccttgggttctgggtagttgttttcaggtgtatcttcaaatcgtcatccttatatacctagcattttagccttgttttatctgattggatctcaccgtaatgtaattatctctttcatggttttatttccaaatacagtcatactccacatacagtgacatgagggttaggacttgaacatgcaaaatttggagatacagctcaggtcataataggagttttttttttttagaatcctcagcaaacaagcatcagtgtcatggtgaaggacagagaggcgcttactgctgatcctgacaaaggagatagaccagcacagagcagaaacttgagtcaccttgtccaaagactcacctaggagtgctcagggccgaggtttgcacatgccattgggctgtctggcaatagtcctgcagtatcttcatggctcctaggaagcccaggctagtggagaggtagccctcttttcctctgacagaagcaagaggattgcaggctgaatctggagggatagtttttggccgatgcttattttttttattagcatatactagttatacataatgtatttcattatgacattttcatttatgtatgtagtgtagtgtgatttattcatcttcttttactctgtgttgtcccctattctgctctcactgaccttcccctcatccagtcttcctctcaggcagagcacataaaagaaaagaagccaaccttgttgtcttttacccatgattgagcctgagcctgacttgttctgaagagttctgatcctctgaacaaagactgtccgctgtattgaactgtgaagcaactatggtctctagaaagaatgatgagcttttgttttaatcaatattttcaggattcttataaaggaagatattgtttaaatgactctattgactcataaaggcacacagtcacaatcagatgttctgaatgtatgccaagcaattatgggggagacattgttttcaatgccttactgtttctagtgcatattcttaggtctggttaccacacacacactgttctgaatcaagggcatgaatgggtcatgtagagaacatagcatcagatcaaagctagccagcttagcttggggagttgattacattgggaatctaaaacctagtaagattgattacattgcttttcttaaggctaattctggacaaaatgaaaacatagtatgtcagtaaaataagaatatagttataaataattttaaagcacattattaacttgatttcagcttggaagaaagtttgatttgtaaagatatgttttggaacatttccagaaaaagcatttctataccctttttattatacccttttcctctttggtgaccttatgaatttcattgagatcacttacaggaacannnnnnnnnnnnnnnnnnnnnnnnnnnnnnnnnnnnnnnnnnnnnnnnnnnnnnnnnnnnnnnnnnnnnnnnnnnnnnnnnnnnnnnnnnnnnnnnnnnnnnnnnnnnnnnnnnnnnnnnnnnnnnnnnnnnnnnnnnnnnnnnnnnnnnnnnnnnnnnnnnnnnnnnnnnnnnnnnnnnnnnnnnnnnnnnnnnnnnnnnnnnnnnnnnnnnnnnnnnnnnnnnnnnnnnnnnnnnnnnnnnnnnnnnnnnnnnnnnnnnnnnnnnnnnnnnnnnnnnnnnnnnnnnnnnnnnnnnnnnnnnnnnnnnnnnnnnnnnnnnnnnnnnnnnnnnnnnnnnnnnnnnnnnnnnnnnnnnnnnnnnnnnnnnnnnnnnnnnnnnnnnnnnnnnnnnnnnnnnnnnnnnnnnnnnnnnnnnnnnnnnnnnnnnnnnnnnnnnnnnnnnnnnnnnnnnnnnnnnnnnnnnnnnnnnnnnnnnnnnnnnnnnnnnnnnnnnnnnnnnnnnnnnnnnnnnnnnnnnnnnnnnnnnnnnnnnnnnnnnnnnnnnnnnnnnnnnnnnnnnnnnnnnnnnnnnnnnnnnnnnnnnnnnnnnnnnnnnnnnnnnnnnnnnnnnnnnnnnnnnnnnnnnnnnnnnnnnnnnnnnnnnnnnnnnnnnnnnnnnnnnnnnnnnnnnnnnnnnnnnnnnnnnnnnnnnnnnnnnnnnnnnnnnnnnnnnnnnnnnnnnnnnnnnnnnnnnnnnnnnnnnnnnnnnnnnnnnnnnnnnnnnnnnnnnnnnnnnnnnnnnnnnnnnnnnnnnnnnnnnnnnnnnnnnnnnnnnnnnnnnnnnnnnnnnnnnnnnnnnnnnnnnnnnnnnnnnnnnnnnnnnnnnnnnnnnnnnnnnnnnnnnnnnnnnnnnnnnnnnnnnnnnnnnnnnnnnnnnnnnnnnnnnnnnnnnnnnnnnnnnnnnnnnnnnnnnnnnnnnnnnnnnnnnnnnnnnnnnnnnnnnnnnnnnnnnnnnnnnnnnnnnnnnnnnnnnnnnnnnnnnnnnnnnnnnnnnnnnnnnnnnnnnnnnnnnnnnnnnnnnnnnnnnnnnnnnnnnnnnnnnnnnnnnnnnnnnnnnnnnnnnnnnnnnnnnnnnnnnnnnnnnnnnnnnnnnnnnnnnnnnnnnnnnnnnnnnnnnnnnnnnnnnnnnnnnnnnnnnnnnnnnnnnnnnnnnnnnnnnnnnnnnnnnnnnnnnnnnnnnnnnnnnnnnnnnnnnnnnnnnnnnnnnnnnnnnnnnnnnnnnnnnnnnnnnnnnnnnnnnnnnnnnnnnnnnnnnnnnnnnnnnnnnnnnnnnnnnnnnnnnnnnnnnnnnnnnnnnnnnnnnnnnnnnnnnnnnnnnnnnnnnnnnnnnnnnnnnnnnnnnnnnnnnnnnnnnnnnnnnnnnnnnnnnnnnnnnnnnnnnnnnnnnnnnnnnnnnnnnnnnnnnnnnnnnnnnnnnnnnnnnnnnnnnnnnnnnnnnnnnnnnnnnnnnnnnnnnnnnnnnnnnnnnnnnnnnnnnnnnnnnnnnnnnnnnnnnnnnnnnnnnnnnnnnnnnnnnnnnnnnnnnnnnnnnnnnnnnnnnnnnnnnnnnnnnnnnnnnnnnnnnnnnnnnnnnnnnnnnnnnnnnnnnnnnnnnnnnnnnnnnnnnnnnnnnnnnnnnnnnnnnnnnnnnnnnnnnnnnnnnnnnnnnnnnnnnnnnnnnnnnnnnnnnnnnnnnnnnnnnnnnnnnnnnnnnnnnnnnnnnnnnnnnnnnnnnnnnnnnnnnnnnnnnnnnnnnnnnnnnnnnnnnnnnnnnnnnnnnnnnnnnnnnnnnnnnnnnnnnnnnnnnnnnnnnnnnnnnnnnnnnnnnnnnnnnnnnnnnnnnnnnnnnnnnnnnnnnnnnnnnnnnnnnnnnnnnnnnnnnnnnnnnnnnnnnnnnnnnnnnnnnnnnnnnnnnnnnnnnnnnnnnnnnnnnnnnnnnnnnnnnnnnnnnnnnnnnnnnnnnnnnnnnnnnnnnnnnnnnnnnnnnnnnnnnnnnnnnnnnnnnnnnnnnnnnnnnnnnnnnnnnnnnnnnnnnnnnnnnnnnnnnnnnnnnnnnnnnnnnnnnnnnnnnnnnnnnnnnnnnnnnnnnnnnnnnnnnnnnnnnnnnnnnnnnnnnnnnnnnnnnnnnnnnnnnnnnnnnnnnnnnnnnnnnnnnnnnnnnnnnnnnnnnnnnnnnnnnnnnnnnnnnnnnnnnnnnnnnnnnnnnnnnnnnnnnnnnnnnnnnnnnnnnnnnnnnnnnnnnnnnnnnnnnnnnnnnnnnnnnnnnnnnnnnnnnnnnnnnnnnnnnnnnnnnnnnnnnnnnnnnnnnnnnnnnnnnnnnnnnnnnnnnnnnnnnnnnnnnnnnnnnnnnnnnnnnnnnnnnnnnnnnnnnnnnnnnnnnnnnnnnnnnnnnnnnnnnnnnnnnnnnnnnnnnnnnnnnnnnnnnnnnnnnnnnnnnnnnnnnnnnnnnnnnnnnnnnnnnnnnnnnnnnnnnnnnnnnnnnnnnnnnnnnnnnnnnnnnnnnnnnnnnnnnnnnnnnnnnnnnnnnnnnnnnnnnnnnnnnnnnnnnnnnnnnnnnnnnnnnnnnnnnnnnnnnnnnnnnnnnnnnnnnnnnnnnnnnnnnnnnnnnnnnnnnnnnnnnnnnnnnnnnnnnnnnnnnnnnnnnnnnnnnnnnnnnnnnnnnnnnnnnnnnnnnnnnnnnnnnnnnnnnnnnnnnnnnnnnnnnnnnnnnnnnnnnnnnnnnnnnnnnnnnnnnnnnnnnnnnnnnnnnnnnnnnnnnnnnnnnnnnnnnnnnnnnnnnnnnnnnnnnnnnnnnnnnnnnnnnnnnnnnnnnnnnnnnnnnnnnnnnnnnnnnnnnnnnnnnnnnnnnnnnnnnnnnnnnnnnnnnnnnnnnnnnnnnnnnnnnnnnnnnnnnnnnnnnnnnnnnnnnnnnnnnnnnnnnnnnnnnnnnnnnnnnnnnnnnnnnnnnnnnnnnnnnnnnnnnnnnnnnnnnnnnnnnnnnnnnnnnnnnnnnnnnnnnnnnnnnnnnnnnnnnnnnnnnnnnnnnnnnnnnnnnnnnnnnnnnnnnnnnnnnnnnnnnnnnnnnnnnnnnnnnnnnnnnnnnnnnnnnnnnnnnnnnnnnnnnnnnnnnnnnnnnnnnnnnnnnnnnnnnnnnnnnnnnnnnnnnnnnnnnnnnnnnnnnnnnnnnnnnnnnnnnnnnnnnnnnnnnnnnnnnnnnnnnnnnnnnnnnnnnnnnnnnnnnnnnnnnnnnnnnnnnnnnnnnnnnnnnnnnnnnnnnnnnnnnnnnnnnnnnnnnnnnnnnnnnnnnnnnnnnnnnnnnnnnnnnnnnnnnnnnnnnnnnnnnnnnnnnnnnnnnnnnnnnnnnnnnnnnnnnnnnnnnnnnnnnnnnnnnnnnnnnnnnnnnnnnnnnnnnnnnnnnnnnnnnnnnnnnnnnnnnnnnnnnnnnnnnnnnnnnnnnnnnnnnnnnnnnnnnnnnnnnnnnnnnnnnnnnnnnnnnnnnnnnnnnnnnnnnnnnnnnnnnnnnnnnnnnnnnnnnnnnnnnnnnnnnnnnnnnnnnnnnnnnnnnnnnnnnnnnnnnnnnnnnnnnnnnnnnnnnnnnnnnnnnnnnnnnnnnnnnnnnnnnnnnnnnnnnnnnnnnnnnnnnnnnnnnnnnnnnnnnnnnnnnnnnnnnnnnnnnnnnnnnnnnnnnnnnnnnnnnnnnnnnnnnnnnnnnnnnnnnnnnnnnnnnnnnnnnnnnnnnnnnnnnnnnnnnnnnnnnnnnnnnnnnnnnnnnnnnnnnnnnnnnnnnnnnnnnnnnnnnnnnnnnnnnnnnnnnnnnnnnnnnnnnnnnnnnnnnnnnnnnnnnnnnnnnnnnnnnnnnnnnnnnnnnnnnnnnnnnnnnnnnnnnnnnnnnnnnnnnnnnnnnnnnnnnnnnnnnnnnnnnnnnnnnnnnnnnnnnnnnnnnnnnnnnnnnnnnnnnnnnnnnnnnnnnnnnnnnnnnnnnnnnnnnnnnnnnnnnnnnnnnnnnnnnnnnnnnnnnnnnnnnnnnnnnnnnnnnnnnnnnnnnnnnnnnnnnnnnnnnnnnnnnnnnnnnnnnnnnnnnnnnnnnnnnnnnnnnnnnnnnnnnnnnnnnnnnnnnnnnnnnnnnnnnnnnnnnnnnnnnnnnnnnnnnnnnnnnnnnnnnnnnnnnnnnnnnnnnnnnnnnnnnnnnnnnnnnnnnnnnnnnnnnnnnnnnnnnnnnnnnnnnnnnnnnnnnnnnnnnnnnnnnnnnnnnnnnnnnnnnnnnnnnnnnnnnnnnnnnnnnnnnnnnnnnnnnnnnnnnnnnnnnnnnnnnnnnnnnnnnnnnnnnnnnnnnnnnnnnnnnnnnnnnnnnnnnnnnnnnnnnnnnnnnnnnnnnnnnnnnnnnnnnnnnnnnnnnnnnnnnnnnnnnnnnnnnnnnnnnnnnnnnnnnnnnnnnnnnnnnnnnnnnnnnnnnnnnnnnnnnnnnnnnnnnnnnnnnnnnnnnnnnnnnnnnnnnnnnnnnnnnnnnnnnnnnnnnnnnnnnnnnnnnnnnnnnnnnnnnnnnnnnnnnnnnnnnnnnnnnnnnnnnnnnnnnnnnnnnnnnnnnnnnnnnnnnnnnnnnnnnnnnnnnnnnnnnnnnnnnnnnnnnnnnnnnnnnnnnnnnnnnnnnnnnnnnnnnnnnnnnnnnnnnnnnnnnnnnnnnnnnnnnnnnnnnnnnnnnnnnnnnnnnnnnnnnnnnnnnnnnnnnnnnnnnnnnnnnnnnnnnnnnnnnnnnnnnnnnnnnnnnnnnnnnnnnnnnnnnnnnnnnnnnnnnnnnnnnnnggtgtttgactgctcgcctgctgcttggcccccatcttacttttcccagaggtataggctgggatctcacttcccactcccactctgagtctttctcttggtgcagtgcatgaatagtctgttcctagacctgcccaagcaacctgtcatagggtacacgggtaaggactgtgacttgggtcactcgtgtccctgtagtgtctgtactgcacttgtcctttgagtttgacatgagcaggttggttgctgaacagaatgccaggagctgacttggaggtgtggatggtcagaggaaggtgaagatgccacttgaaaatattaaataaccaaacgaaggggaatgtcaccctcttcttagtgctccttcatctagggccagatgtggtgtctggatatacgccactccactcactggcttcctggctggactgtcctccttgggggctggttcagttctacagggtagtgtgacctgctgtccctttggggtagtgtctctcctaagaggtctgcattttaatggggagggagatgttagtcctgttctccatactgagggacagttccaccagaagtagtttgtagcacttggaggtaaagtcacagtgctctggaatgctctttgtcccctgcagaggagggtgctaagctgtgtgactgccctgctgttgttacgtggtgttggattatggttttgtttaaagcactgtggtttggtgagaagggcttgagtatttgggtatgtgctaagtggaagcatctgggttacgctgtgccagagaaaggctgctggtggggcggcagggacacgtgataggagctgggctggcttttaaatggaacttccagaaagccaaaggaatccttccagcatgctccatagagctggcttgcatggcttggaactcacccattaaggaatggcagggaatgtccagtctatactgcctgctaacctggcaccacaggaaaagatgctgtcggacctccaagccctgtgtgagagaaacagcaaacaaaactgttttgacattgtaaagttggactgcttgttgtgaggactcactgagggtgtgattaggtctggccaagtgcagcaagcgactttactttgggtagcattcttttattttctcctcccggaggtgttgcagtcattgaagaaagaaagcccctctcttcattcttactagacccagatatcatccaccaaagacaatatctcccccggcttcatatccctgtcccgccttgactcctctgtcacaagagaatactttgctgtgttctcttcggggaacccaatgcctgtggctctgtccttgggttatgacacagtttgtctgtagctcaggggactgtctcaggccaggtagattgactatgctgttctccacagtctgctttttaccctatggaatatgtgacctgagggttttttaggacttggcttggtcttaggggcctcgactcaggtcaaaggcaggggtaacttggcctgccaccctgcagagtctctccatggcggttctgtgaccctcttctttctgtttttccctttaggcatggaaatatctgtcctgtgtctgccccatcatcatgatgtgggagcagataacttgtttcacaggctcataaagggaagtccccccccccccgcccccatgttagcctcaggctacttcctgcaggcttctggtctattcactccctcagccatgtgagctgaggtccaaggtcagaaacatggcctggtccttgagggcaagcgactgaaacccccaaaagtccacatataaattgacaagtgccctggagaagtctgtggtggtatggaatggaggctaagagtgggcccctggagaggaagatgagaacattttatatttgaagaggagagggaacagtggttttaaacatcccatactgagagagcctttgagagcagaaacgggctggtgtctttggcttggttgttgctcagggcaggagccaaatgtggccaggagaaaaactgctgtggctgtgaactttcaagcacaggtttgaattcccatgacccctacaacgacccctgcatcttctaaatagcaaagacgaggctcagtgatgttaaaggactatcaaagacacagctgggaaaggaagaactgggctgcaaatgtgctctgaccatgggtctatggatgctcaggccttcattcatgccctgcatgactagaagctatgaaacataggaactctagggacacatcctcctggcagtgatggggcggtttaggtcgtggtaaggagaagatggggctggagagtgagagatcagttgggaaggacagtgtagtcattctgaagttggtgctttgaccaggggacacagcactcgaggttggagggatgggagaggaagggatgatcctagaccatgtggtctaccagtagagcatgaaagaaaggaagatccagtcacccttcttggggagacactgctgccagtggtctgagaagggctgccctgccctttagggtcttctgctcttaaaaaaccagacccctgcctgggccacaggatgagtcagagtgaagccgagcttctgatgttgagataagagatagcacaagctttaaacaacacataagtatttagagagcaggagaaatgtgtaacaagtatgcactcctaagtcatgggtcctgttctcatgtgtctttaagtgtctttgttcattcatttgtttgttcattcattcatttgttcattcgttccttcgttcattccgtttttggttttctgagacaaggtttctttgtgtaacagccccagaattctctttatagatcaggctggccttgaactcaaactcatagaggtctgcctatccctcctaagtgagtgatgaaattatagtggtgcaccaccactgactggctgtctttaaactagctctgtgcctgattctgtggttttctgagttatctagtttaagggatgtgctatatgtagggcttatagattaagcaaagtttaaaaactaaatataggatctgacttacttatttctcttaaagttttctgtttgtttgtttgtttgtaaatgagatttaaggtggtttctcctgggtgttgtttaacttcagggaagagagaggaatgctattaaacacaagaccccgtgtgagcatagttcgctgcttttaacttctttgtttgagatgcctttagtaggaagatctgcactttctctgcaggtgattttgacttttatcagccttgaactctctggccagtttcagcatgaggggctttttaacccttctatattcattaagtttctctgtctttctatcccgcctcaatctccttcctatgactttgtttccctaatctgaaggtgtcatggggggggggattttttttttttcctgaagtgttctgtggctgagacagggatgtagaaaggattggagcttgtagaagcataatttgttggaaatttaggagaaaagatgctatgacctgaggtatcaaactgcataaacaataacgcattcagcagattgttgtgttaattttagtgttatcactaaaaatagaataacattttttaacaaggtgtctgagagccatgaaataaaagaaaaaagcatattgatgattgtattcttcgactgtgtcaaaatatagcaagaacagttttaaaaaggaagaaggctcgggagaggcttagcgggaaagaatgctctccgtggaagcaagaggacccaagttcagagctgctgtcctatgttgaagctaggcatggctattcttgacttaacctcagggatagatggattctgagggctcagtggctggatggaatacccccccccccatatggcaaatttcaggttcaggaaaaaatcatttctcaaaaagtaaggagggaagcattaacaaccttgggccgttggaagtgagtgttggctgcctgttggtggtcttacctgcatagacacgtgcataaatcaagtgtacgcacctctccagtccacacttccctccccccccccagacaaaggagggagagaagggagagagaagagaaagggatttagttgtggcagtttagaaggaaaatagcatactaagttgtaatcatttgttattgagaatgtgtgactacatgtgattacatgtgtgtctaaagcaggagttctcaacctatgggccatgacctgtttggggattgaattacccactttcacaggggtcacatatcagatttcctgcatatcagatatttacattactatttataacagtagtaaaattacagttataaagtatcaatgaaataattttgtggttgggagtcaacagatcatggggaactgtattaaagggtcacagaattgggaaggttgggattaaaggaaaaacaagagagaagcaaatttaaacacaaaattagattagaattatgtgtagattttttaagtggaacttatccgtataagtctagttggcaggctgcaggtatgagagaccttgtcttcaggatgctcttgagtctttgagactcaggggcaggcttgattttaaagaataacttcttgaagtgttttgattttttttttttctctatctgagaaggtgtcagcacacattacaagagatgagtaaaatccatggccagtcttctcttgaaaatgtcgctttcctttggacttgcctaagaagccagtgggttagtcttacctcctgggttcacacacagccaggaggagcctggcacgcctgacttgttagcctgtagactttactttctgaaagggtcatgtcgtctgcccactttgtctagagaacaactggagaaatgggctatgggtgtgaaagcaccccttacttttcgggtgaagatgtctaattccatgccttgactttctgtttcatatagagcaaaaggagttttaaaataggctggaggctgcaaggctacttagatggcagtgccatttttggagacattgacatggtgggggtgagggtgggggtgggtggggagagtttggggctgggtagggaatgagactttgccagatctggtggcccaccagacacagagagaagggaaaacccagggaagactctaggtttctggcttggtaacagtgctggcatctctgagctggggtgaggagcattgaaggtgtgatctgttggtcccctacttccccccaacccccgccccgtgtgaagatacaggaagggaggttcgtgttaggtatgggctggtggagcaccggatcctactacctatcatattgacaatgagtccatttattttcatccataaatatataaacatttctccatagattacagagttgatactccagagtccagaaacaggccaggagggaagacgctgggcatacaactgctatcatccttttcctgcaggatgaaagatatcaggagaaataaatcacatgtaggtgggcaggacagagcttagtttcctgaaactattggcttgagaggaaggtcagagctcagcaaggaaagcccttgtcatgggcataagagcaggaaagagagagaggggacagtgagctgtcaactggtcaggaccacaccagattgggttaggacggtgcaggaggctgtgaaaagtcatgatggaagttaaccgtccaacctagtgggttgattccacaatataaaacgccatggatcccaccttgtgtctgctgctgagctcctgggaagttcccagcagagttcaggtccttatctatgctatggaagctggggctcagctcagtgagctgcccagaagatcctgataaacatcaaagtttgaggacgctaaagtggctgagtcttcagtgcagggggagtggtaagggcagcttttgtaatcctctgggtgaggtaatggagagccagccaaggctgcagaagcagatgagctcaccactggccagccctggggagaagatgctgcctggcttcacatagcagcgtaggcacacctggttattctgctcagtctcctcagatgcctcaggaaacacccgcttctcctcacctctcatctggaatcttcctggctgcatcttctctctgtgttgcaatgttctggggtgtcccaggtgctcctctattctcctctgtgccagttcataagcctttcgtttgaccgctttaaataccatctctctgtagatgactctcaaactgctgtcaagacttctctgtcaacccaagactcagagctccaggtggccccttagcacaccttcctaaaatccaggtcccgattggatgccacttggctcttcctgttctcccggggacttcgggtttgaacctcactgtcagactctgcttctctcacgcctgagtgcagtctgtcagtaaatttcacaggcttcgctctggacttcagtcaggacatatggcatctcctataactgtccctgcccgtactaccttctcttcttgtttagctttcctgtgttcacagtggctttcctttgtgttttctgagcagcagctctagtaaatcctttaactaagtcccatcatgtcactgtgtgctcagaaccccttaatgggttcctgtcttaggagtgggaaggaagaatgtgaattctaaggtaggtcaccttgtttgttttctcatctaatagagggagaatagttcataacttccctgggaggattaaatgagataaagttggataattcctgatccatgtagctaacaagtttctgtccaacaaaggaagagaatataaagaagaattgggcctcacatcaattaagctttggtcctgtgccagccataccacacagctttctcgctgtcttttagtttagtttttttttttttttttgaaacatgtctcactatgtggctttgactgtcttgcaactcttatgtagatcagaatggtcttcaactcagaaattcacttgcctttgcttcccaagttcgaagattaaagctgtccactgctatgccctgccagtgctgttccatccacccatgtcaccagtgcaggctcggggttagggagaatagcgtgtgggtttcactgtagggactgtgtgatgtttctgactttttttttttccctgtggcatttctttgttatttgcttatttctatacttttcttatcattgaattaagtaaattcttctccaattatataagcagtgttcagatgcctctggtgttctcggcttcatgttactgcggagacctcttccagagcttagggctgtctttttccatgcttggtacatagctggtactctggcatttccgctgcgagtcctattacattctctgagtcctcgtggattatgtaaactcttgtgttgttttagtgggcagctagatgagatgtttgggttcagttgcctgtatttacttgaggtctgccttgtttactctgcccttaacagtaagattcattttatatggatttgaagaagacacagtggagcctcggagaagttaaataagttgtatacagacccacagccacaattcagcagagaccaggtttttcactgtgcctgcctctatctttctatctctctgtcttgtgtgtgtgtgtgtatgtgtgtgtgtgtgtgtgtgtgagagagaggggggggggaggtgcgtacatacctgggagtgcaccttgaaaccagagatagatgtaagatatcttcctcagtcactttccacttgaattatatatgtatatgtatatatacacaataaattatatatatgtgtgcattaacatatatattgcatatataaaaaatgaaatatatattaagtttaagtagagtcactcactatgtagcctttacttaactggaacattctatgtagaccaggctggccttgaacttacagagatacatttgcctctgcctcttgttggctgaggttaaaagtgtctaccactacaacctgtcttccactatctttagagatagggtctcacttggagttcactgattggctagactggctggctagtgagccccccaatccttttgttccccttatccatctctgggatcacaagcctgaattgctgaccctgggttttcttttctggtgggcactggggatcagaactcaggtcctcagccttgtacagcaagccctttaccctctcgcctgcctcaggttttaggtgttaacagaagcgtgtagctgtacagcctgtttgagagtttttacagatatggttgaggatttaggcactgccaggaatttccttccatctcctccttttcctcgttcacagctccttgttcttcctttcctagagagatgtctcttttagcctttatagaggctgtctcccaagctcagagagagcaaaatgcatttcttaaaatagccatttacaaacagtgtggtttacgggaggcctgtgtattacaggaaggttttattttcttgtgctatgatagaactcctttatcgtttcttggcgatgtggggagagactgtaaataagctgaaccaatgcatcatggaagttgtatggcccttaggtaagggcttgtttagatcttgcctaccctgaatgcttaccctgaatgttgctggattccgctgtttcccaggctggaagagcaggggttccagggaactccagtcctcttcccaatgtgttttgcaccctgtatagcctcaaggccatctaggtgactcctgttgtacagctcaggtgatcatgttgtcctcctcacatgttgctgttctagagcatacccgttcgttcctcattggctgctttcatcagcacaagggtcattttcttctcatctggtcttgccttagcaggagctgcaggcttagccatcctcacagagaagatgtcattcatagagacctgtgagtgcaggggaaggcacatcttgatcccctgttgtctgctgtatccagtatataactgttttagaatgggcaagccattctatcaaaattataaaaacaaataaatctttcccattggtaaggaaaggtcacccaacttcctcttgggccttgcattctggctgtctctttcctgacctctgtcagctggtgtttcatttggatggcactgcctactttcttctccctcactctctctgggatacccctcagcacattgcttctggagctttctatatagtatctatacatctccagtgaacctcactgttgagggaaatgttacctcttgttttctaacagtttcttcctagacttcaacatttcatactacaggaagctccttaagtaggaagataaacagctcaaaatagtttcaggaagtccctgaaactgaccagatttaagagggccctccctgccaaaataagtagagccaagctgcaaagaagacccttaggggagcctagctgcaataagattctcagactggctgagatgccaagaggactcccgagaggagaaaagctgtaaagaaaactcttaagaccagccaattgtctataagatgaagaaacgaactagctgaacttcctggaaggggtttatatcagaatccttaggaaaggacactctctgagctattgagctgcctgcaggctgagcagtgtgctccaggttctccagcttttaggagttgtcaccagtgctggaatggccttggtgatgcaactgtctttaagccatttctgcttctgaactaactccaataaaagttattggttcaccaagttgggccttggtggtacctgtagtttgttgtgagttgaaaatcaggggtgagtaaatgtatatgttgtatctccccaggaaaagttttgtcacacaatataactgggggcctgacagggtccagagatgagttggggaagagtgagtgcatagttctgcttatgggaaaccaagcatgcaactgaaactgagaagcctgagtggggaacatctgtggaggaaattacagtagagttgtcctttcctgtatggtgtgtgttagtgtgttggtgtgctatgacagcagttgcatggtttttgttatggcagtgagacatgcaactaagactgagccatcaggattaggagtgtctgtgtaaggaatcccaggatggtagtcttcatttatgtagtatggagtggcatgcctacttgataagggggggggggcgtcctccacatgaatatgggagtgccctgaaagctgctaaaggttagaagaaatcttttggtccttgaggttagtgtgtagggaggggtcaagagtgttgacaagcggaggcagaggttacttggcctctgtactttgtagttaaaaggcatctgaggcagagatggaaggcaatcaggaaattgtttgtgtaaaggagcaatttcaacaagaaagggagatgggctagtatcctctgtgttagactatgatttggcacgtaaggtacataaactagatgatgagatggttgatgttgacttgtcgctcaaggcttgatttgaggattggaagaaaaagagagtagaagttagattcatggtcaaaagtccttcctgggatccaagaacttggagcccatggaaagattgagagagtaaggcaaaagagaccatggtaaaagcaacagaagatactctgagggtctgacctttagcaggaaaagagggaaaacctgcgatccaacataaaaatgaaggtcttaacaatggtctggtacaaactagggtgatcaggaaatgttcagctcttggaaatgctagaatctgggagacttgtaaacaagcaacagaagagtttgccattgaaactgtgggaaatgggagtggatgggatcagtctaactgctgtggaggcagaaaaactgatccatgtaactatccattccctttaaggcaaaggatgcataacctgagagggtatgagggaaatcagcccctgatttatcaaagccattaggagcacttagttatcaccatctcaggtccccataaatgttaggaactgaggaccatggaaggacagatgccattgagggaactaggaataggagaagctgtgcttgaatgcagttcaagtttagtctgtcagatagaactatgtttacagaggaattaaagggaccctgaagctgggatggggtgttagtggatttggtgagctctttggtggggcaaggtctttaaaaagtaggaaaggtttttggcctgtctcagtgacttagaccagcatgtaaagactgtccatgatgtaaaagaataagccagaagagataagcaaaagacaacagaggaagagtttgggttcttcaaagacaaattatggcaagatctagcttgagctcccaagggggccaaagtggatggaaagcaaaactgtgggctgaggagcttctcgaaggctttaaagcctggggagcagttaacagaacacacacacgtagcacaatacaagtgttgtattagcctgtcccaggggtgagtatttataccccagactaaggagggtatgtttttcttcaagaaaggttatggtaggggtggagatggtttgcctacttgtcaactttcctaagatctaggtgtggcaaatggggagacaactgttatagtgccaacctagggcctgtctgacccagggtgccagcaggtacatcagggagaacaagccccagggtccctttggccctgggtggtagatcggagcagattaagtcaggcccaatgagtttattgggtatggagaactgtatggaggagctccaggatatggaagcatgatggcgtagagagaatggctgaggattacaggagctaagagttagcacctcctgtccatgctttgtacccaacctcgatctgtggaggattagaccatgcttacgcttggctttagtatcttctagtggtgaatttttgggatgacctgacatttgctgagaacaggtaacagcagactttcagagagcttcagcaaggtcatctttgttaggtggtggtggctcagatgttaccttgtcctgcccatactctggaaaaggttttgtcatataggcaaagaactagccatgtagatttggaaagccattgaagagacagccaaggtactttcacctttcttacatcctacctgggctgggttaattaaaaggaaaaatgggttttcaaaacaatagctaggggctggagagatggctcagtggttaagagcaccgactgctcttctaaaggccctgagttcaaatcccagcaaccacatggtggctcacaaccatctgtaatgataactgaatctcttctggggtgtctgaagacagctacggtgtacttacatataataaataaataaatctttaaaaaaataatagctaaagagttaaaatccaaaaggcaccctacatgggtggacactcccagagaccataagattaataaaaattccagtgccaggaggctactttcctgtgcgttgttggtcaggaaagctcctgaggccccacaaatcataaaaactaagactgctgctattggtttgtcaaaactaaacaataagctcctatggccgaagataccacgtatgcatgctttgacaaattttggacaaattaagtggggcatgaactggaaactcacaccctaatggctaccttttgtattgttagagaggcccttgcaggctgctggtggagagctatcaccaacattcctgcttgccaaaggaccttaagtgctaaaacaccaacatgctagccaggatattcctgtttatgcaatagtggcttggctgttgtgggttaagaccaacagccttccatttggatttaatgccttttccacgagagagagagttcaggcctggtactgtaaggtaaaacagttgggaggttataggtccgaataggaaagcaatttatatggcttttctagatggatatgatattgcccatcactgttgctatcaggctcaactcatacccactggtaaagctgagaacagtggctgctactgtgacttgcagcctatttcttagccataggtggatcctcttcaaggctcaggaaccattgtggaagagggagcaaaaagaatataagagctagaggaagagacagagtaacagtttcctctgagattaaaaacattccaccctgcaaggacctccttaagcaggaaggcaaacaactcaaaacagcttcaagaagtgcctgaaattgatcagattcaccaggtccttccctgccagagtaagcggagcctagcagcaaggaagactctgagacaagctgagctgtaaagactgagaccatatcagttgcctagaagcagaaacaaggtaagctgtctggaagaggtttataccagagtcactcagaaaggacactctccaatctgttgttctgcctgtaattcttcagcgtgttccagcttcccagcttttgtgagctgttatccatgcagggatgggccttggtgatgtaactgtctttgagtaatttctgctgctgaagtaacccctcaccattattcctgtgaataaccacagtaaaactcattggtccacctagttggactttggtgatccctgtattttagtctgttgtgggttccctatctaggatgaatagataacatttccacaggaaaagttttgtcacacagcacctctctttgtggagggacatacagacaaggaagacacagagcccgtcattgcttgttgtgagctagcacacttgcctctgttgtctgatgaatgatgtatataatcattttccctttttcctagcacaaggctcccaaaacttgaggtttagagtgactcttagatgtattgctaaggctagaggaatgcatagactagcttttgttatttataataaatctctttcaatcatatttaagtttatgctgatgacgtgactcccagagaatgaaggctaatgaccaaggaaaccaactaggagagattgaagggttaaaataacttcaaatgtgtgtgtgttatatttttatgcatatgtgtgtgtgcctgagtgcatatgtgtaccatgagtattcagtagcctgtcaggcacagaagaggcatcggataacctggacctggagttactaaactcatgtctctgaaagagcagtaagtgttcttaactacagagccatctctccagccccatgggttagaacaccacacttaaccctttgtgaaatattaagttttgtgagccaatctagcatattatcaaacctggggaaggggtggtggaccccttgttttgtagctagtcagctcagaggcctaaacttcagtagcatctggggtggggacagattgtgggattgagccttcaacttgtgatctgagacaaactgctggtatgtagtgttaagattaaattgaaacagaaccccttgcagtttgtagaagattgaacatttctcgtaggaaaaccatttaatgtcatgagtgcaagagaagtgaagtttcttttagcccaagattcttaaggcaaaggtttccccgttgtgtaattgtgtattcgttgctaacgtgacatttatcttaggaagcgggagaatggcagttcacagtcagaagggggatggctggagaccacctgccttccctgatttagtaaaattccctgtgtccacacagtggggaggaggctcctgtggcacattacctgttgtacacttgacaccatgatgtctcacagtggccctgtgacagctggcaggaacccatcattgctcacatgtcctgctgttacctctgatccagcaggactagaagtgaactcatcagctctgtctggagcagctcccccgcacccacccgagtccctgctacagctcctgggctgtggtgaggacacacctttgactcatgcttctctttctgtgagtgcccagggtccacccgcttgctatttgccaagtaccagctcatcactgggcggacattctaggttgttcttctaaaacttctctgttgcggtgtaggtatcacgagctcttggatgttgccctacaccaaaccgatcccatcaattttcaccctggtctgaggcatcagccttgaccaacctagactcatcagttcagtggagcctgcctgccttctgaaatacgaactctttccttaaaagtctgcactccatttccatctgagctttttgttgcgttacatctggtatccagagctgtgaagtagtgttcccaggttcctcttattaaattgtccagaccctgtgatggaccatgggagtctgtggaaggctttgactcattgagagtagctggttgctcctgtataatctcatcaaccattttgttcttagccaactggtgcctgcccttacatgcctccctgcctcacgcaccgccccctctgcctggaagaacattcttctccttaccttctgagaaagctcctattcatctgtcaggacgcagtgacgctgcctacccacctcgaccggtgcacctcactgtatgccataagtatttgctcatagttttgtctcttccaatggactgtgtggcccatgcgagcagttatcaatacctccccagtgccaagaatggcagagttcaggggatgatggttactggattcattattttcccacaagtatttctttacaaacagcttgcaccctataaggcacagagacagcagggttgataaggtttgacagagtcccttgtttcactgattcagaaaatggcatgataggaaatgaacatatagatagataagatacttaggaattgtgggtatactttacatgtatatacactttacacatgcatgaatgcacacacacacacacacacacacacacacacgtacactttatgatgttcagagaaggctcctctgggaaggtactttgaaagtgagacctaaggatgagagtaaagcagccctatagaaagctagggagcaaactcaacagcgaagaggttggcaggtggcaactcatagagtagaacacagtcctagagtgttgggggagccgattggaagcagtgctgcagaaagagcagtgccaagctggcctggcagctgttaccataggccatgcgatagattacaaccattttcctgtgtaggagcagtaagatggttttggagggaagtatttcaaacttcagcttccctatggctgaacaagccctgcttctgccgcctcttctttccctgttgccttgtctgtcctgatccaagcttgcttccctctcagactccaataatgtcacattctggggatagtctagaccacttttctgcttcgtgggagtcctggtccttgttacagagtgtatggcccctaccaggaccttgaagtactagttaggtcccctgacccccgctatgagtgactattcttattcccttaagctagttgtgcagtggttcttgactccagacagatccccctccccaacccctggttaagtgcccttgcttctgaaccttccttggcccttggcgccatggaatattgtgtttccttccgagtggagaatgtccttcttactttgtcatctgcagggaaaccggcctctgagtgtagctgggttcttcctccatggccacctgcagtttagcttcaaatcttgtcttgtgaattggtctggcaaagatatgtccagagatattttcccactttaaaggaaaaatggcaaaaccagaccttactgtatgcaaggagctttcagcgtgactttactgacactagtcgtgtgggttagatgctgttgtcctcagtttgcagttgaggaaactctaaggcccagtgatcacatagtaaattaacagtagatggtagatctgggtcttggactcagcctagttctttgtggtcttaaattccttaactattctatcgcttgtgtggtgcctaatttcctccaggggtttcacatcctaggggaagcaagcagagcccttcagaaccatctgtttcattgctttggcgtgggaaccatgcccgggtcatttaaagtactgatacatattaggtacatgcgtaggctttgctaaatgagcaaacaaacgatgactcctgctcccagcttacagacgtgagctcagtatcttcttaggatgacaaatgctgttgtaagacctcctctgtcatccagggaggtgagaagcaggaaacatgagaggaggcagcaagaagtcagcttagccttcgtgcctttctaagaagcagaattattgggagatagaagtagttgtcatggatggggaggatgggagtaaaggaaggaagtctgtcatccttagtgatgggccctgagaaaagagattggacattagaagtggctggactgtatgtgctaggaggtgttcttgactgggatttagcctagattgctgttgggtaagcgggtaagatagtgtctgtgttttcgggacagcattttctacctgtctttgtaaatgtgatactcttgggtggggtgcatttagagaaaggagagtgacagtggcagtatttcacctaggaccacacacatccaagggaaggactgtgtgtaggtaagaggcacatatgggtacaagacagtagagtcttccccagtggtggttagagcttctggggccatgactatcggcacagagaggtgtaacaactctcgtgctgctacaggggattctgggtaaactggtagctctttgttataaaacttgaatgcttaagagactgcttaagcaggagggtgaggctatggagaaaatggaaactaaatacacacctccccttccccaccccctatgatcattattattattctgtgtgtgttgccacagcatatgtgtggaggtcagaggaaaacttttggctctgttctctccttccacctctacactgttctgagccaaggttatttggctcatgtagcaatctctttccctgctaagctaccttcctgaccctggcctagaattaaaaacaaacaaacaaacaaacaaaaattttatttttttcatttcatatgtatgggtattttgcctgtatgtatgtctgtgtaccacatgcatgctgtgtcttcagaggccaaacaagggcattggatcctttggaactggagttacagatagttgtcagctgccatgtgggtgctgggaaccaaactcaggtcctgtggaagagcaggtggtgcttttagctgctgagctatcttgctggcccttggcctggattcttaatgaaggtatgttttatgagcaatgaacacagtgttctaagcttaagcatttgtgggaaaagtatctatctcacacatggtaactgcatttagccccaaatcaaatgaatggagccgttaaagttgctatacttattaccattaatgtagttgtcatgaggtctttgtatatgtccagactcatcagacagaacatgcttatcaattatacttcagtaagctactgtttttaaacattggagaatatatgttggtggatctaaagcactttcatggtctagcatgcataacgcctaacttctgtaatttctcctttgttctgtatttgacttttcagtagcagcaggagactaagcagataaaaggagccatgacttctgacgctagtcatatgctggaagctgccctggagcagatggacgggatcattgcaggtgagctggagtccctgggacgaatgtcctatcccccatgtctcagagcccatttccttttgttggcatacagaaaagccctccgttagactaacatttaagtagtttaatgtacatgcccccttctctctttcttatggaactctattctactggtatgataatttgatctggtaggcgtaccagctcccgtgtggggctctgtagagagtttggatcctggctttgcagcagtttgggtgcaatgagattgattctgttgtaaaattttcagagcgcatcgtggcttattactgtgcaactgaagcttgaaattgagctgactttgttccctaatcagcgtctgctcatttccctagctgtcatccactgtgttgaggagacagcaggcagttttgattcacaccgtgattatagcattcttttcctcctatcatttttaaaattcaccccaagcgtttggttttaatatttgcattagtcagtagagactttctttagaaaggttacagtataattgtagacacttggggaagactaccagtgtgctattctggctgattgactgatcaggaagctgtgcttgtaacaaggctgctatttcaaatcttacaagagggcctcaggttttctttcagtccttaccagacacattctagtactgctatctgcagatagagtatgctgcttctggcctttgctccccactgtgtgaactctagagtcacaggaagagatagagaaagaaggtacatggttgagtggggcttgactgtaggaaatgctcagtacatctgatacctctcctttcctgctgcttgcttcttcctattgcagaaatacatctgagtcatggagggccctgggagttggagcctagggtgagggaggctgtatgctaagcgtcctcatgttacaggttccactgaaactcaaccgagctgtcatctggcaggctcgcggtttctctatcaactgaggtgttcttggaaggcatgagcaatgtcctggttttccaagtctccatggtttgagatgttttgttctacattaggttctgtgataactgactgagaagacatcatcaagagagtgggtttcctagccgtgggcttaaaaagcctgatctagaagttctcacctgtactgagagaaaagccacagggttggactgaggctcaggccaggacatttgagccctggcctgaggactgattccctggcaggattcatggagagctgtgagaatgaatgagatgattactatttctccactgcattgctgttgtttctttatcccagattattgactgcaggtgtgtaggtctaattttcaggtttttgtttggttcttttccagtgtcacagcgtgttaattactgtagctctatagtaagccttaaagtcagatctcgttagtacggcaactttgttaattaccattgtgtttgttggctagcttgagtgatgagttggggctctttccccaacctccagtctctctcccctttagaatcagtttgccgaacacagaagaaaacttgttaagattttggttggaattctgatgaatcaccacaatgtattggagctagagatgtaggtaaagaacacaacacttgtctagcattagaaggccctgcattcaatccccatctctgctcaaaagaataagaactgctatcttgatggtattgactcttggagagacagataggctgcttcccaaaggaggtggccttgtgtgggatgaacatgcagaccaaagttcaatccccaggaccatggaaaatacccaggtacggtggtatttgcctattaactccagtgttggaggggcagacataggagggtcccgagggcttactagcaggcattctcgcctaattagtgaattccaggccaagttttgagaccttgtttcaaaatatcaggaaaacagcatcaaaggaatggtaacaaaggttgctttctggaaacacatcatccgtacacacttgtgtacacacttgtgaacacacacaatgacatacatacacagaaacacacatattcacacatacacacttgtacatagacacacacatacacatataaacacacatatacatatacatatacatatacacaagtacatacataaacataaacacacatatacacagaaacacacatattcacacatacacacatgtacatagacacacacatacacacacatgtaaacacacatacacacacatatatatatacatacaagtacatacataaacatacacacacatatacatatacatatattcacacacactcaaaaaagacagataagcaggtcatgaggactgaatgatatgagaaccctgcacaaggaaacccaggggaggtcttttgatctggagacatttcattggaaatctgaggtgatctggaggacagctttccaggacaggagacagaacatgccaggggctggagagaatcaatgttcataactaaaagtttacaagccagggcaaggaaaagggacaaggccccagatgcagaaagacaaacgacattatgacattggctagtatgtggagaacttcagccattggtatgcaagggggaatgtgacttctgttgcgttctccagcttctttgtcactctgtgggtgagacagtctttaagggggcaactaaaaaagcagagaccagccagactatatgtcaatcttatagagccaaactatatgtcaatcttatagaaccagactatatgtcaatcttatagagccagactatatgtcaatcttacggagccagactatatgtcaatcttacagagccagactatatgtcaatcttacagagccagactatatgtcaatcttatagagccagactatatgtcaatcttacagagccagactatatgtcagtcagtcttacagagcctgaagagtccagggatgaacagataccatcaacccagaggaatagaacagagcgtccatagtcagaagctaaccgtagcctgggaggatcagactcagcatggtaaaggttttctgcccttctttaatataccaagacagtacattttagccagataacctttaatctcagcatttgagatgctgaggcaggagtatcactacaagtttcaggccagcctgggcaacatcttgactgtaaacagagttagcatttattttatagcacttactgtatgccaagaactggtgtatgtgctttgtgtgagtaccaccaccctccttaggtaagagctgttcttagtcccattgaaatataaggaaactgatgctcaaatcatggagacaacttgtagagccagggtccaaatcaagtagtctgcatacagttcctcctccctacccacctgcaaagaagggcttagggttttcatactacaaaactctcatagctgttccagacagaaaccgagaaagcttgtccagttacacccttcaaggatggagggatgcggaataggctgtcccgggaagtgaggaaccaagtctcccatgttctgaacaggctgtgcctgagccacttccctccagacctgtcccagattctcacctgaagatactgaaccgagacaaggccttttgaggatccagttaaataatcaaccggtgacagagaggactgtttcagaggctctgttgttttagatatgcccgtatgggaaggcaggaggcagcaagcacgctatggactgagccatctctcctgccttatttatattcctttatagcacatgtatcattgcctgttacattcctattgctctttttattgaaacagaatgtcagttctaagaacaaaggctgtatgtaccattgcatctctccatcagtctgccacacacagtagctatttagtaagcatttgtcatgtccacaatttatttgcttctgtaagttcttttcattgggtaggagtcaggtacagttttctgtttgtgttttctctctggtgtcatactgactatcactcttattttctctacttggacgtttggatgagtgagtttatgtatttatgtatgtctgtatgcatgcatgtacttattgtttttcaagacaaggttttcctttgtaaccttggctgtcctggaatgcattttgtagaccaggttgactctgaactcagagatcctcttgcctctgcctccggagtgctgggattaaaggcatacaacaccaccgcctggcttggatgaatttattttttttaagaatatcacatgactatttttgaagacttagtagctgctaagtcctgtgaatagtctcttagttgtaattagctgacaccagccttcgatgcaactcaactttgatacaactttgagtttattactatctggagagtgtgcgcctctgtgatatttttagtgaagaggataattattgaatgcctttattcaggacacctttcttcaaagtttctaatacaacctcattttcaagaatgctaagactgcttgggacaaagagcttagaacttgtgtaattatgtctatggtctatggagccaagctttggagtttcaattccatgttagccagttacttctgtgctgtctttgacagctgtatattccttctctgctcagtttccttgtaaatgaaatagtggcatcagtcctatctttttcttattattatgagaagtaaatatgatcaggtacctagtgcctggtacttagcactcagttggtctatgacatctctgctttattgatactagtattaatgttacattcactatcaaaaggcacagtgctattcaattaatggaaataatactgataattgcccttgttatatgtgatgagcacagtaggactgtcatactgaacaagtctgtcctggaggcacatatgcctcccttccctgcagaacctcagtgtgatgatgtttgtctccaggtgatcagtggctaggatgtgaagggggggggcttccaagatgtaaattggctttgtgaatgcagaaagaaatgcccataagcaaaacccgtagggctaatcacataaacatagttcttgaatctgagtgggtccaccataggtatgaagatattgcttgaatcccacatgtttgtgggagaacgttgagaggaggtaactgttaaagactctaggacctggctcagtaatgatttgtttgaatacaaagagcattgttggagcctgcagtaggatgttgaccttccatccagtcttccttctctttagtccccatgaatccatctgcagataatactgtaattgaatggtgttgttggcagtggaaatccagccatgtgttgcctaattacatccttgtggacggcacggagcagccgacatggatgctgagtttacatagggctttgctgtgtggatacacagttcagtggctgctctgccaggcccctcttggcataggaccagagccccatggtcaggacacagggggctacttattcttctttgctttggcagaaagttacccatgtgactacctctaagctgtacttattgataagagataaagactgctttaggacagctaaggaactggttacccatcttctgggccttctgccagccctgattagtgtctggcttcgaatgaaggaagaaataaagatttcatgggggtggaaaagttctgtcaaggctgagatggttcctttggcccttgaatctcagccatgggggtcatggctgaggatgtggctgttatcctagtattcattagctggtcctgtcggctcctctgcagggcatcagtgtagccagtcattagtaacagcactccgcctctactgccgctttcccatccaggatttaggttgagagccctgtaacagctttattcagaagaaatttgtaatctgggtatatggcagcacatgtctaaccctagtacagaacaggctgaggcaggaggattgtgaatttgaggccagacataagaagatatactgattctaagtaaaataaatacatacatgcattcatacatactcctaaaattttaaaatcatttgtgtgtatgtgtgtgaatacagatatatgcatgtttacatttatataaagaacagtatgacatcagtgtcttctattactctcaagcttaatttttgagacagggtctctcactaagcctggaactgactggactagctgggacaagtctctaggttcctcttgtctcttccaaatgctcgcattccaggtgtgcccaccacgtctggccttttctgtggtttctggggattcaaactcaggccaccattcttgcgtggccagcatttatcaactgagccatgcccttagaccctgtactggctagttttgtgtcaacttgacacaactggagttatcacagagaaaggagcatcagttggggaaatgcctccacgagatccagctgcgaggcattttttagtgatcaaggggggagggcccattgtgggtggtaccatctctgggctggtagtcttgggttctataagaaagcaagctgagtaagccagtggaagcaagccagtaaagaacatccctccatggcctctgcatcagctcctactttctgacctgcttgagttccagtccgacttccttggtaatgaacagcaatgtggaagtgtaagctgaataaaccctttcctccccaagtgctttttgctcatgatgtttgtgcaggaatagaaaccctgagatgaggtcctttactgattggtagggctggccggccagcaagccccagggctcctcttgcctctctctgccgccctggtgcatgataccacgcatagctgttaagcgtgtgctgagactgggattcaggcccttccttatgcttgcccagcaggcacttgactgactgagtcgtctttgcaggctctgtttctattcattgtataatctgtgccttctttacatttggattagtcttgctagagatgatctttttgtcactactctgaaccagctgctttggcttttatcagtcagttaccccatgtgtgtgcttttctgtgaatagttacatatgcatgtactgatatctctgcaccacatatctatactttcttatctggatttaatttctttgatatctcgtcatcctcttaatttcttagatgtatctcttctctttcagaatctcaccttaaaacagaaatgattgtatagattttaaattgattctaccttgcaaaatttggttgcagttacctgtggcacttactactgatgtttgcttaatggatggcctagacccctgctaccattcactagtattccgtgtgagttcacgggcacacgtgcaggcagggatttctattttcctgttacattcacttgtaagtgtagtcgtttgcattttctctctccttggtgattacccttgtcctctggatcccagcacccctaagacagttgcctttttattcacctgttctgtgtggtgctagggattgaagccatgccccgtgtctgctgggcaagcgctgagttactgcctcagcccctagatgatgggcttggctcctggaattacaggcatcttagataattactggattgtttgtgttagggttagggttccaaacccaagttttaaaattggctttaaagttgattggctgtgaggtggttgacttctgaatcctggctttatacagaaatcttccatttattttcacctctgctcagccctaaaggcatgtccccttccctcaagtggcccactgaaggacagactgtaggaggctaagcagaggctcagctgatgatgcactgatctcacagtggacctgacttcagttcccagcacccgaggtacactaacagcttctgaggcagctactgccctcttctggctgctgcaggcactgcatcacatatacaaatcctcacatattcatacctacatacatatacttaaatttacacatttaagttgtaaagcaaaaaagttcggactatagcccacagagaatttggcagtgaattataggccaaacactaacccagttgcttttactacagaggttctgagtttcaaagtttcccttcagttccctggctttggaagtcacatgaacttttgtatctacgggtatcttaggagtttttctctgtgtaacctgtttcatatgtctgcccagtggctgtcagagttctgtggtgttccttagtgcatggccctttctccttctttacaccaaggaatggctaatctcaactctctatgcatcctctgggttgcctcaactgcacctgtaaagtccttgatccatgtgaggtgacatattgacaggcgtcaggaactagaatgtagacatggggtcaggtggagtgaacagttcatacagatggagatgacaacattagttctgctgtattactaacttaagaagttgacttgacttgaagccgtgattaggatcataaacattgtccgttatgcatacccctccctcaaacactaattgaacttagcctctggctgtagacttcactctgctgaggtaaactgttctcaatttatcccaagggtagtaccaacatttagaagatggctggctgtggagagaaacggtgaattcttttagctagtgagaagaaacattcttttttgggatgaggttgggggtgggcagtttttggtggggtggtgtcatttgacagaagggagtggagaggcggtaaatgtggccctagtggaatctaccttttccccggtagaagtactgaaatagggatgttttagtctatcttgtgctactgtaacagagcacttgagactgggtgacttataaagaaaagaaattcctcactgttctaaatacaaccataagattccagtatcaagaatgtaacccagcagcctttcagtttgtggattgtgatttatttaggggtccaaccctttcacatggttgcctaagatgattgggaaacacagatgtttatgttataatttgtaacagtagcaaaattacagctatgaagaaaaaaatgaaatttattttatgttggggtcaccacaccactagggactttgttaaaggcctcagcattagggaggttgagatccactgctgtagcatctgataagggacagggacagcatctgtgtctccccatggcagaaggcaggaaacaagaacatccctaagaggggaaggagtgagggcagaactcatgcttttattaggaactcacccccgacataactggtccattatcctggaagccctcaagtctgtgcatgaaggtggaatcctcacacatttaattaacttttccttctcctgttctcccttccccctttccctttgatattttgtcttccctttcctttgcttttcctttttatttcctttttactctttcccctcccccttcattcttcccttaaagttcccttcttctctcatcccccctttttttcttcccttcctctttaccttttctggagatgaggtctcattttataattttcttgccacactcataattgtcttgccacagctccctaagtgtgacatcccaggcatatgacaccacacctggctcctaattatctcttcaagatctcacatttcaatatttgtgtattaggattaggctcacatgtttgcttattttgtagatagtgatacatcttccaggttggctttaaactctcactgtggttgtggatactctaacctctgcttctgtagtgctagaattacaggcatgggctatcatatccagtttaacgtcggggatcaaatctagggcttggtagcaaactaccaagagagccatccagcccgatgatgagtgtcaaaccatatgatctcgttctgagttcttggttttctcttgggacctcccatgtagcttggtatatggtaggtttggaaacgtgttctgtatgtgcatgctttaacataaccttctctagtgaaaggagacattgatctccacctcctttatcaactgatctgttttcactttatgtctggttgtgcctgctcagtttatcatttcctgagagagatgagctcgattcgtatctttacccaatatgtgattggattttcatatttgtttttgtataggatttatatttctgagctgatgagtgagacgggctgtgattttctttagtagcaatcagtgggttgcacagttctgggatgtgtgagaaggcaccgttcaccattttctctaaaacttgtcccggcactctgtccttcaaagtgagttcctcttttctaggctaaaataaattgttagactagtttgttagactagtttggaatcgtttgatagaattatgaaagcatttggcttgctctttttttttctgtcaaaaagattagaacagtaatacagaaatacagtaatatataagattattgatgatcattggtttgttacaggatttttgggttcgtatagggttattgctaattttttatttctcctttggttgttttttagaagtttgatcaatagtttatactgttctgatgtatagtacacaatatcatgacattcattattgtttatagttaatatatactaataaaaatttgttattaagcactattaataaaatcttgtacttctgttttatcctcaacaattacttgaacattaaattaaataaattaaacaaaattactacatattaagtttaggttttgcttcttttttttttaattagatattttctttatttacatttcagatgttatcccctttcctggtttcccctctgaaaaccccctatcccctccccctgctcaccaacccacccactcctgcttcctggccctggcattcccctattctggggcatagaaccttcacaggactaagggcctctcctcccattgatgaccgactaggccatcctctgctacatatgcagctagagccacgagtccctctgtgtgttttctttgtttggtggtttagtcccagggagctctggggttgctggttagttcatattgttgttccttctatggggctgcaaacccctccagctccttgggtactttctctagctccttcattggggactctgtgctccatccagtgcatggctgtgagcatccacttctctattagcctctgtacaaataaaaaaccagcattggttgagtgaccttctaatgcagtagtcttcactttggcttcatcttagaatgcctggaagccttttaattaccctagatcacatctgagaccaattgaattcagttctctaaagtgggacctatgcatctgtagttggcaaaattccccctgtggtttctgtaagcatcgaaagttgtaaacctttgtgctaacttgtattccctaagcagtgcccgtgttatttgagataatgtgttcccagggagagaaacttgtttttagcatgcgaatagaagttgaatcacctttttctgagaaataatttaggggggaatcccttttatatacataggcacatggactgttaatctattgtcttgttctgttgactccaggattaaggcacacattctcttatttgttgtacgtggtttttaattttgatttgtggttgtaatgttgtgtaggaggtggtcatctgcaggaaactgtgcctgtgtaatgattagctgtagctcttgttcactctggatcattgtgtgtactgtgtactgatttctgtttggggatttttaggaaagaatgcaaaataggcatttgatctgcacttgtggtatgcagagacctgtggtttgcatttttcacagtgtgtgggtatgtatggctttacagacatgcccggggccctgcaagtttctctgccatggggaacattctcagagccccctgacttccactcagcatagctgctctccccaggcacagtggcccagctccagtgcggggtccttcctctgggtctgtgcccgagccgctctagaattagtgtgaacttacttcgtcatttcgtttggagtttgtttccagtccccggggttttacttctccttcacgcatgtctctgagttgagggcctgtttcagcttttctgtttgttcactgtgagtaaaggggactcctggaggcctggtctgcctgctggccaggagaccccctcaggctttgcatgctgtccaacagatcacgtgacccggccataggtttctgagattgcttgaaaatataccagttcttcacttgtcatttactgtgtgaaacaaagctcgtcagggctcagggagagaatgtgtctatctattcactcaccactttactgtttgaagaagggccagagggctgaggagatggcttggtaagtaagtacatgccgggtgagcatgaagacgtgcattcagatctctagcacccatgtggaagccaggcatggtgcatacacctgtaactgcgatgcaggagctggggaggaggaacagttggatgccagaactcactggctggtgaagccatgagctcaaaaaaaaaaaaaatgatgtggacagcatagcagcacacttgaacacatgtacgcatacatgaataccacagacacacacatacacacttgaaatctcttatgctgatgttgtctaatatccagtatggatttacaaaacatgtttcaacctggagtacctgtgcaaactaagccaagtttcaagctctcacttctaacagtgattgccattattaaaagttacccccccatatatacatatataacatacaacacatatatatgtttagatatccatatgtacatatgtatagtgttttgcctgcttgtatgtctgtgtgccacatgtatgctgcgcccatggaggccaggagagggcatcaggtcctttgggaccgaccggagttaatagatggtcagtgtgagcgttgggaattgaaccgggttcactgtgacagccgccagtgttagctcttcacccccttaatcaatattttacaaatcagtatatggctccatgtttctggttctctggacagccgtttcttttatgtatacctatatgaattatacttttgaatattctagaagtaatttaaattctcacttagttggtggtttgtacctttcctttttcagaattagcacaccgctgagatcattattatgtaggaatctttgatgcacatctgattatattttcttagattagatttgtaaaattgaaatttgttattaaaaaggtatgaatagttttacagtatcttgccaaattgcttattacaaagaattgggctaatttgtgcgtctctgaacaggttctgagtgttcacactatctgcttgtcaacaatgatcattgcatttccaacgtcattaattttattagtgaaaactgaattaccattcttaaatgttttatgaactatccagaaaacattttattactatattttaatttcctatttgtgttttgtgtagctgtcccagaattatctgtgtaaaactgtatgcctgttttgtgtgggagaagtgaattcagataattttttaactgattcataagatgtctctttaggaagcatctacttctgttataattgttatgcgtggtgccttcagtcttgtttttttttttaatgtagcagaagttaattttatatagtcagtgtgcagcgctttgttatattttgctcagttaccattgtgcttaccaaatcttaatctaatccaattttcatctgtacctttatacttacactttaatatttatatataatccatgtctctaaaattttacttatgtatgtggtataaaatatccaagaccacaccatcacataaagttagtaaaaacctctatattttcagtctctctcagcccaactcattgtctagttccctgtataaaagtctttgcagttagagtgtgtggcctacaggatggcttggtagggagaacacttgctgtgcacactcatgtcctgagctcaatccccgggactgagtggaaggaagaacaccagcatccccagattgccctgatgctgcacttgtcccatggcatgcgtgttgtccacactgacctgtgtgcgcacacacactttaaaaacagaaggggtgtgtattgcagggtaatgattgctgagcaattgtgtggagattggagggcttgctgagtttctaaccattttctcccctgaggtttggcttgtgctgttcctagtcagctctaaactggatctgtaggaaagtgctgagcacgtaccaggacatgggtccttgctctgtcttctagcttcccagagcctgacttgtttgtggattgtgacccataattccctctgtcatacattttcagaaggcaaactggcaatcagattctgtggtaattgtttccttctgtatggattttttccttcccaaactgcttggcaaggatgattttggcttctaaaagttaaagggaccagaaattagatggccatagtgacccaccagctctcattttccagggcagtcctaactgtaggtgttttaccctattggccttaataatccaaatgccttcaaacaggatcctttaaactacattttacaaattatctctaattgctgaaagcacagacatcctttgttagactgtgtgaggtcagtttgggcttttctgtagttgaatgatagggtgtagcaagacaaaaaccagtcctattttagacatactaaattagaaggaactgaccccacatcccagatctctgagggaatctgggcacttactttgttctctgtagctgttcccttgagtattgtgtagtcatttgaacgatttgcaatgcagtatttactggatgctgggaacttaactatgcctggcatagactctgctctcagagtctgcacagcccatcatggggaggtgggctgtggacatgcatagaaccactacagttttaatatagcaatctcccattggagcatccagaatgatcccactttgctataatccatcaccacaatgagtatagtaatcctttaaaaaattttttatagtatacttagctgtccattactgtatccaactaacccaactaactcaggtcaacctttgcctataattccatgagtgtggtaatgttcgatagggatggctcatgttatgttacctgggatggctactttggatttgggagggcctacgatggcttcactcacaagtctgccactgcagtgagatggccagtgacagttggggctgtctcctacagggtagctgacctttgttacaaggtggtttggccctgaagaggaagagcaggagctgtcagtcctcttaagccccagagccagcattggcacagtcccttaatcccatgagtgaatgggaggagtttggagtagccatctgtgcagcgtaacactgactcagaaggaaataagtacatttgaaaagatgaagaagtgggtctcgttgactttggtcactggtgagggctgtctgtgttttatcagttgtattcatgtgtgacctttgtataccaggctcaatgggctttagctggctctgatggacctctcttcctaccattgcaggtcagtataaagatgctgctgccatgttcccatggtgaggtaggagtaagcttccagttgagaagttcactgtctatgacaacttctcgtcttaccaaggtctccacctctcttctgttccaggcactaaaacagctgcagattttagtgatggtacctgtgagcctgggctgtctcccccatccacctgcttgaactccatgcctgtgctccatctcattgaggacctgagactagccttggagatgttggcacttcctcaggaaagagaagccctcctgagccaggtccctggcccaacagctacctacataaaggagtggtttgaggacagcttggtgagttggaccatggtctgataaggaattgtgggactcgcaatgatgcagcagtggaatgccaccagtggccagagctgagggcttctccctgcatctcccaaccctatcttactttgcatatagctttgggtacatcactaccgggtggtcctcagcaggagtaagaaacctagtcaagctatttaagctactcgttctgccttcttgtggtcttcaataactgttctgaggtgaggaatccagggtcagatagacacccctagaattttatgtgtgacttactggattcccttagtggagttttaaaccataacctaaagcctgcttgcttcattagtttctgtttctgcccataattcttgccatataactactttttgtgcactaagtataattgagatttacttgtctttttatttagtttttttgtgatttctcttggtcaggtctggagacttgctggtctgtaggggaagggaatgaggggttaatctacaaacttgctatagctttagtttatccaacttctttcccaaagagatgggcaggtcaacagatggagaattcatattatctaggaatgtgtaagatgaggagctaaactgggatgtggccattggagggctgtgtgtgtgtgtggggggggggggggcgtggatgggaagccagagaaaggatgagagggaatgaaagaggggtgcacgagtgtggccacctaagctcaaattgaggttgagggctggggtacagttttctaatacagggctctagtgctagagccctgcacacctgttcagagttagaaaatgtgcacaggtaggaggcagggacagggacatcaaattgggagggagagtttgatgttggaagttgagacatccttatccataaatcatgtcatttatgattaaacaccctccatcccagatgtcctagcctcctttctgtcctagcgggatatgtcagtgtatctcagcccatgccttcctcaacaatgaacagtccctcattatcttcattacgtgggttattcaatattttcattacataggctgcctgcctggtgcctttgtcatgtacctgtgtcagtgtagtagcagtataacggtcttgcaaagatgtctttgtagcaatgggcagaacctgtgaatatgtttatgaccttaaacatgaaaggggagtaagaagatagaaaacagtttcaaatgaactgatcttaaaataaggcatgtagcttggactgtataggcagtcccatgtaatcataagagcccttataaacatatccctttctgttctctgagttctttcatgtgtctccagagccttatttttgctggctcccttacagttctttccagaaccttaccagcacacagccaggagagtcattgacatttctttctgagtagaagtcctgtctgctcatagctcagcagtttcttgtctgtcttcttcactgtacagtttacagtgaacatgtgtccgttggtcatgttatatgactgtgcctctgtttatgcaacagtctttctaatactgacatttagattattttaagtctctcaccatatgtggcattgctgtagtgactacccttttctggctctaggattttctagaagtataattgcagagatcaactagggtcatcatttaaaatctacagtgtccagttaaagttgattttagataagtagtggggaagcatgatcaggtatgccctaagcagttgggtaaacccagcaaccataatccaaaaatgttaatatgtttaagcctttgacacatttttccaaatctcttttcagaagaatttctttgtctttattttcattggttgagtttgaagcaagccttgcccatgttatcctgaggtcagaaataatcacgaagattaaaaaatggctttagcagttccataaggggaaaaggttcactgctgttttggcacatttctttctttagtgagaaggctaagccttttaaaaattagcttattagtattctctatagtttctaagcttttactttcataccctgcgtgaaaaacattccacatatatacatggtcacatatgaattattttactaatatagttaaattatgaaggtaaaatgttctaacggtggaaaggataagttcaaacataattcaaagtgttcttcctccacaccatgataccaccttaaccccttgggcaggtctgttctgccctctcttcaaatcttgtgctcagttttctttgatggtttggtgttgccatattgaaatgcctttttattttatttgagtgtatattttcctaagggctatgctttcaagccttggggttttagaaaactgtagttagcgctatctgggtctcttccttgtagccctacaaaggcctgacttaacctcacatcaaatacctaggtgcctgcttctccatctagtaggtttgactgctgtgttgcagttcactcaaattcatcagtatttttaatgtgtagcatgaaaaaaaaattcattaaatgttttggggaaatatattaaaaacaattatgttacacattcagttggtgtggtacttggggaagcatcttgtgttcaggtttgcacagtttttagggacagattatttacagtgatggcaggaatccaatgctgaagataggtttccctaaaagctattgcgttcataaatcttttagagtaattattcctatcaactacctatgaatggtgtccttttcgggggtcagaagttcacataaacatttcacgaagccagagctgcatcttaagggcttgattctgagcagaaaaggcctgtctgcttttcaggtctgactgacctaacgtcagtttacattctggctctacacacattccacactgggtcttccctgtacagccactaaattcagagcagtgaacaggtcactgggtgctttagagtgctcctttcagggaaagacttgccacacacattttggcctgtttggctaggagcttgtgaaaaaaaaatgagatttcagatcagacattaaactatgttgaagtgattccttaaagtttaagaaggtttgctttagtcactgagactctacttgattttattttaaaattccatgttgttttagacagggtctatgtttcctttccatgtagaccaggctagtcttgaactcatagaagtcttcctgcctctgcctcctgaaagctgggacaaaagtcatgttccatcacactttttttttttttctcttaaagactctgaggtagattaggattagcgttggaaggagacaggtagtttgatggacccgtgcctccttgctcaatacagactgtgcatcgtatgcgtgtgtttcttccattatcttctgcagacagactggttttgccacatacctcaaagttcctgttttgttggaacgttagcctgagactgtccagctctgccacataacatcgctatctgttggggtactttctccaagaaagcagtgtcagcagtagggtttaactcactagaaacctatagagaggctgggcatgcccatgtgaaaacactggctctagatgacttcaaaggctctggctcctcccacatttctgtcttaccatctgctggggctggcttttcctcaggtgtgtcctttaatggctgaagaagctcaggcgtggctatacagctctgtctagagtcgctcagtttcttttgatcagtatgtccgtttttatttatctttaattaaggggagagattttttttttctgaaatcctccagcattcttcctattggcctggtggccaagatgctactagagcatcagtggaggctgggaaagaataataggacattagatcaagaacaagttgggtacccctcatcaagacatctaacagtttcagaattggagaattttaaatttcagagtttttgaaactttatttcacatttcttgattaggtatgcttagccagtagattctatgtaaatgatgatggtgatgatgatgatgataataataatatcttttttaaaagcaaaaccaaaaacaattaaaatatcgccagtccaaagcatttcagacaaggaaagtttaccctacattgacttcagtttgtcttaagtagtccaaggtgagctggggccaagcttgcagaaggtggttgctgccagaaaagaaaagagtggagggaaagaacggcccctagggaaatgtcccaaaatgtcttgaacacacacgtgttcaacaagtcatttcaatgttttcttcttatattttatttgatacaggctcttactaggtgtgcacctagttttaggtgatgctgactgtcgaactcaggacatcaatcgtactagtaaacactttatgagccaaactacagccccttcactctcctccatcaaaataacaaaaaaaaaaaaaacaaaaaaaaacaaaaaaaaaaacctcaaatccccaaagcaaagtgtctcattgacctgctaaataatgttagagctaaatcctccaggtacataaaagtactaggtgccaatgaaatagaaaggtagaactttaaaacaattatatttctttgtgtgtgtatgcctatttatgtgtgagagtgtgtgcatgccatagcatgtatggtgtgtgtgtgcatgcttgtttatgtgtgagagtgtgtgcatgtcacagcatgtatggtgtatgtgtatctgttcatgtgccccagcatgcatgtagaggtcagggaacaactttgggtgttggttttcaccttctgccttgtttctaagacagtgtctttcttgtttttcactggctgataccctaggaactcccagccaatgaaacaagggattcttctgccgaccccccccccccatctcaccatagacatgctgtgattacagttgcatcccacatctagcttttacaggggttctgatgatctgaactcaggtcctcagtcttgcacacacagaaagtgctttccctcactgagctgtctccctggtccaaacataaagcttttcagcagagctgtggattagctagccttgtgttatggtgttacatgacccctgctaagaatcaccaagtgctggccagagaggatgggctgtgccatgcatgagaagtttgctctcctgctgctggtgttgtccagcgatgctagtgtcagacaccatagggtccctaacataaagtgcttggtagagatgtagctttgggtgtgggggcatggctgctgattagaagaggacaaattgactagtactgggcctgccttttctttatgtcttagaggagagggcactcctggacctgccgaatcagagttgatagctgggtatatctgagcacagggcttgttcctgcagggctgaaacactgctatagaaatatagcctgcaagaatcttggtcatattctgccaggatgcctcaaagagcaacagacctagccacaataaatcactgctgagccataagtttctagagctctgtgttttagacccttgccctgccccttggcaatgtgtgggatgagaagtgggctctaggcttagaagggcatatgtagggctctctaatccggggccagtgaaacaaggaacaagaggttgggatttccttggtgtctatatctgaattctgggcctactcatggagagtggattgacaaggcctttgtacaatttcttggagtccaaggcatgctgaggctgcctgcaaaggggattcaaggaggtgcttcagttctatcctgtaggcagcagaaaagttaccttcaggagataggacttttgtcctttatgtttggtggacagcgagaagcaggggtaggtgctcacagacgatgcagccggaacccctgaaagtctggagcagtctgtcttgtgatcgaatttgagttggtttccagatagggcagcttccttttctttgtgctgtgctgatgtacaagttgatgctgttcagagggtagagatataagagcttcacaccagacagttctgaagccaagaagagaggtgtttcttagaggcctgataggtagcacaggcaagaaaggcttggtgccactagatatgcttctgagacttctggctgcacctcaagagggctttcatgtggtctgcaaggggcgtgtctacttttccatacctgcttggttggctgggtagttttcttgatgtggtcagcttggctgtgtgtggagccttctaaagagattagccatccagagtggcatgttcgactagggggaagaggcacgtttgctagtgtagagctgatgtgagccccagagccagcagtctccagatggagcagctctggttgttcctctaacattctgtatacacccctcttctgccagcagctggtatagcctttggatactatggctatgggccaaagagatccttggtgaaagttcaagatggagtcagagagggagcaggggagcccccggcaacagcaaagcgagggcaagtcaaggcaggattgtaggatgtgagccagtggttggcagagatgcttgctccaagaggctgctgttctctttggaactggagcacatgcgcatccccaacctccaccccaggagcccacgctttcctttgtaatacagcaggtgtccaggtcagttagcctaggaccgggaaagcaagctgaacctaggcaaggtggggttaggaggtagaaggactttaaaaggccaatgcttggtcctcttctgtaccctgagactcagtttcctactggaagtgatatcagtttagttttggtatctacaagatctggcctagctagcttggctcctcttctctcccccttctctcccctccctcctctctctttccctttccctctcccttcccttccctttctgcatgcatgcatgcttgtatatatgtattatggaaaagggtttcatattcaggctagaccttcacctcaccgcacagctataaattagctcaaagttttgatcttcacgcttctacctctttagtgctagggctttaggcccatgtcaccattccagggttatgtggtggtgggtatggtaggttttgtgtatgccaaacactttactagctgagctgtgtttccagcctcgtggataagtattttgtccagtgttttatttttactctgtggacgggggtaacaggcctcccttaaaataacagccttggtcttagtccacacttcttagttttcaaagtggaaacagtttagggagtttcaactgaggcctgcatcttaagaactgtgcaaagacctgcctcagctgtgcattctgggaggcctcacatagggtatgtgtgcatctctgacatcttaagcccatcaatgcaggccccctcacatagcttttgagctagtctttcaacaaagagaaaggccttggaaggggcctgcttttgtcttgtcactgatggtggctccttccattgcagttcttcagacaaagcttttctcttcgccacattcactttgcagttcttcacttggccaaagaagcaaatctgttttccatattggaaagctggaggtggttcaggagaggtaggagagaaagcggcctcactggctgtaaaacatgtgagcttgggtttctctagccatgggattcatttctctgtcaccggtctccagcaggaccaaaatacaggtctgggtatgtttatactgaacatttttacattgttttgttttgtacattgtacaaaactgcaggctggagatttgtagggaaacctttcctctgggtttaaaaaaaagagaagattgggatgcccttcagtggattatagcttcatagtagtgtgcatgcttagaatgtaggtggtcttgggcttgattgtcagtgtatacacacacacacacacacacacacacacaaatacacacacaaatatgcatacacatatgggtaggaggatatttagttttgtagaacaaaaaaggtgcagctaatgtgagctaatttccggtctgtgtttcatacctctccaatggcaggtgtagtgtgcggttcagtgagctctcagacataagtagggatcggtgtcctcccaccccaatcgctgggcagggcctagtggacagtgtgcagtggtgatactttaattcacgtgcagtactttgagaagccagtaggtggcaggcagtgacaaaagctggaatgtctgaaggccaaggactaggaatcaggtagtagattttataagagaaaatagtttgaatttttttttttcttcctcctgtgaggttgctgagcagtgcatctgggtctgtcaaaaacaagagttctttctcattttctttaggaaacagaggacaaatagctggcagagcagggtccattgtggagctgggaaggagagacgggctgctgaggcctgagctttggagcatacatttgacctttcctttgttccacctctccaggctccttgacctttttgctatggcccaggaggaaggttcttcacattccaggaggcgtttcctgggccacatggtgtctgtctcgtgccttgggggcttatgtacacagtttttctggcatcacagataacattgagggactctcagttactgcagatttaatggtattacttttttttcccttgtttttttttttttttttttccccctgcctccctaactaagcaagtaaattctggcaatctggatcctttcaggacctgaccagagagactattccagcccgcaggaaccagtgtttataaatggccaagaatgtgcaaacactggtgaaacggcaaataaatctttccctctgaatttcctgcttcaggcccaggggatgtggtagggggtgttgccagattaccttgacttggggtgtaagcatgtagacacccacttaccctcagcccgcaaacaaggcctgtgagatagactaaccccgagccttctgccccttcagcactgctgcggccagccacaggatgccttctctcagttctgacttctctgagaaacttctggaagtgggtttcttattttgtactacttcaggtgtggtcctgggaccagccatgtaagtgtctccctggaaacttcttagcaacgtgcaattaaatccaggctccatttctaccccgctggtccaacttggcattttccctacaagcccctccaacccaggcaactcattatagatggggaagcttggtgctatcccagaggctggtgagcctgtatttggcctattgcctgtttattatgcccttggatcagctaagaatgattttcgcattttaaaaactgatcaaaacccgcaagactattttatgacgtggaatgataaaaacatcaattttctgcatttataaatgaggtttaagggaagctcagtcacaggttagttagcattgtctgtaactactttcatgctacagatagcagtcaagtgtgatagaatttgtctcttgtcctgacgcctcctgcatccccctgaaggagcattcccaagctcaggccagatgaagccaggctgcttctcttaaggggtgtgtgtgtgtgtgtgtgtgtgtgtgtgtgtgtttgtgtgtgtgtgtattgtgaatattatgaatgcacttgtgggcttatctgatttatttgaccaggatgacctttgaggtgggtgtggggtaactgggttcacctgcagttctgtagggagctctggctgagcccctggggatgtccgagttgtagatacctaaagtccctgttcaaccatctcacttttccccagcccagtccttcctgccagcctcctgtgcatgctctgctccaggtcctttggagtgtgagtttcgtggactcgggggttgaaatgaaagaagtaaaacatgctgaaacagttagattcaggcaagagctgctggttttggacatatcaaagtgccaggggttttgctgagctcccccgctttctccctcttctttcctctccaccttcccctagtccatcagacaccagttgagttactaggcaaagaggcgattacacccttattgttttctaagtagaatattagtttttgctaagctctctgttttgagcctcgttatttcattctgagaatgcttaaatcctttctgtgtaacaagaattgtacttggcatgaagttaaaagaaattagtcagaaataagatgcacttcgcacagtgtggtacggtggagccttgtacaccatcatctgtggtttgccatgggctggaagtccctagggtctagggagggacgctctagccagcaatgggagggttgggatgcatcaggaaggagctgaggaagagtagtcgggggatgctgtctgtcctgctgcatctgagccacctctcccaggaggtaaggtaggggttcatgagaagtaacttcttacggcggcgtcattcctgactctagcaaaagtaaagacaggcactaagcccctctgcagaaagcacaagtttcccttatcctcagggacttggaatcactccaaatcagctccccagcctctgcacacctttattatatactgtgaaagataagtctttatctactccgggcaggaagtacatttcatttgtcttggtgcggaacaagtgtttgcttacctaatgcatttcttcatttgactttcccaggttcctagacacacactctctccgtctctgtctctctctctctctctctgtgtgactatatatgtatatgtgtgtgtgtgtgtgtgtgtgtgtgtgtgtgtatgtatgtatgtatgtatgtatgtatatgtgtataaaatcttccctatccctatattcttcacacattgcactgaggtctagttggggaagcattgggtggaggcgatggctcttagaccacactgaaactaggccagggtaaggggagggatccagagatcatgacagggcagtgagcctgccttttccttctgccctctgatctgggtgtgtctgcaggaatttactcctcccttggtgccagctgcctgctagagccctcctcccctgcctctgatctgtggctctgctgctagccttatttgtgccgtcttttctggcttggcttgtgggctgtagtgaacattgatgtcgtgatgagggggctgttgacaaccagtggagtctttgctttatgctgggatttccaggaaagacacaggagggccttggcagtcacatgatatgcgcctgcaagtcattcactacagacagctgagcacagagcctttgcatgtaaccaccattcccactacacccacatcaaagatcactttcataatcagtcatagccaaaggccacacattaagggttgggcaagggagaaaagctgtgttagggggagctctcaaagaagatgtcaaaatatgaggagagggggtgtggcgtctggggagtcttaaaggggcacgctggagagccagcatgtgacccactccatgctttccagggctccttctgacctggagccactccccacgtctcatggaaactcacccttcctatctccctgctctgtgaagcaggtcctgcagaggtgaaaagagcagggaggcagacccaggactttactgaggcagtaatccctggtgtggtatgtgacctggaggaccctggcagtggtggctcacagcccagagcagcactccctgagggagccagtagtaaaggtcttgaggttgtagcagttggtctctggtggatagtgccagcagtgcagacgacagcagtcaccctgcctaggcctggcacatctctgagcccagaactgagacaggagctggttttaagtctgtcctttttggaaacccaggctttcattagggcacaacctatggcccatctgtaagaagggtaggtgtgagcttcaaagaggggggtccctctcctgctctctgtcactgtttttgtctctctgtctctcgctcgctctcggtgtgtgcctgtgtgtatctgtgtgtctgtgtgtctgtctgtgtgtgggaaccagcaagctcctcagggagtggtgcttatttttagttgtctcccaagtcccaaataaactgagagcagctgggagcctgtgggtaaatgcagagtgaagtagagacaggaaatcgggggctctcagtaatgagttccagccactccagaaaggagaagccagacaaggcattttcttccggactgtttccctctggcaggctctggtattatcactgagaaggttcccattgcccatgtgtgagtgagtgtatgcgctcaagtgtatatgtgtttacaacttctgcctccctgtcttgatgaggttttattgctctgaaggactgaagtcggtcctggtctctgtgtgtgtccatgtgtctgtgtgcctgcctatctgcctgcttgcctgcctgtgggggcggtgggggaggaccctggagcagcaccttcaagtctgagtcttctgtatctgagcctgttgagggaaagaaaggctacaggacacaggccagggaagtggggaaactggaacacagcttgctgttcctgcgggggagggggcaaaggcagggaggaggagagggcttgagctccagccagaaaagagggctttttctcaaccaaggactctaactgctgacatgggtacccagcatggatggggacattgatgtttacaagcatttctcgtggctgaagagggtaagtgacgggctgctttgtctgggtctctctggagatgagtaaggggagagacactttggggtgttttggctgtgtgtgtgtgtgtgtgtgtgtgtaataggggaggtatttatccagcgaaccctattgtggccaagttcttcatgagaatctaattatagacaccgagggagaaaacaggcggctgcctttgtttctgccctgacagcctagtgaatgaacttctgtactgagaggctagcacggagggagggaagttagttatttgtgctttggctcctaagcactcagggtctccatacgctgtgaccaggaaattctgtccacagcctttgggttccaggacacagagaggaggaagctgctgctgtcttaaatgtcctgagttcggaagtcatttaactcattctcagccccgatggtatccggagcagagggtatatttgtcgccagcccggtgagcctctgtgtttccggaggaaagctccagcgcggtcctctctgtagtggtctgcagcccaggattttgtttgcaagttgctggtgccagttctttggggcataggtatctgtgtggcgtgtgagtgagggctgaatggaccctgggggctggatggcactgtactgtcctcagagctccagtgtccttcgcatttaagatgggttcacactcatttcacactgagggagtctaggctgaatctgtttgtttgagagggaggaagggcaagagcacctgacagataagaggcttgacattgtaactgtagaaggaaggacaggaagtgtcccgcttggaagggacacacacatcttcactgtccagctcccaggcactggggtggctggctggctttttgtatgtattctttgcagccggagtgtttccttagcaaatactgagctcctggtactgtgtgtacagcagtgggcagcgttgaatgaatttcctccaccttagtggggaatggaggtcacacagacccaggaaataaacattggattacaaggttgcagtaaggaaggctcaggagagctgtcggtgattgaagcagagggtcaggagccctctttgaggaaatggcacttcacagaaacctaaaagagcaatagtatggagtcaggtggaaaatggcatgagaagcatttctggccaatgcaaaagtgggtggcgctgtgcaaaagtcccaaggcaagagagtctggagggtttcaacacagagaaaaccattgttgctggattcagtcgtggtaggtagaggcaggggaatgccagattacacagaatagccagtgatggccacgtagaggccatgggtgactgacagggtttgtaatgaggaggcaacatgggatccagcaggaggtctaacttgtattttgggaagattgttgtaactgtgatgtggtatatggtaacttgtgttgggcaagtgaggcagatgagacatgattagagttgggtggctgataggagtcagctagtgacagctttcattttagctaagcccagaatgaccaagggcaaggtgattgctggtatcttagtggttgagcagcctggtcttgaaccattttctctgtctcttggtcctgtcccttcatcagttctgtcaaatatgcagagaatgattggttcagaatgcaacagaaatcctgcctgggttcaacctctgctttgcagggagtggggcatcccagccactagaacacatgtcgagacaactagacgtttggcaaacattggaccatcttaagtttttaaaaagccacactcttggagaaacctaggaaacatacttaccatttagtctttttttcctcatttccaaaatgaagcctttaactgcgaagggtctacaagtcactgtgtgcctaggatattaggagctacatctgtatccctgtatggatgctgggactggtcctttgtccaaggttctgtctttaggaaccagttcttcctacaaggcggaatgagatgattctgtctgctccaagacacaggatatgagttctggtgcccataaagtttgctggtggactctgacccaggtgacaactccagaaacccctcacaggacccatagcaaatacattccctttgcttttaggactccaaagagtcactaacaacaagaaatcaaacattgagtattgggtgtattctatggtagattggctcccttctttacaccaaatccttgtgtcagattttttaacctccccaaaccagaagatgctcctactaactgtgaacttggccacgagcctctgggactcacctttagtctggaggagcaaatgtagctagcctcttgagcgtctctgctcttcaggctttcgtcctgaagaacattttcaacctacttctttcatttcatgcttcagtaactcccaagtatatattttctgtttttattttttacagttttactttttatttttgaagctttctctcagctgtcttcctctgtaagccccaccttctttatctgattccattcggccctttgtttgcaaccattcctttactgaccacctagtccccctagggaccctgtagaccaggtgtgcagctctctccaccttttcacgtgcttgtgcagagaacagctttctctcaccttacagttttgaattctgtctcttcgattcttccatgcataagaggtaggttccagaagaagagatacctgtttgaactgtgagctagtgtacattgtaggagccttgccctttgacctcagacaagagggtaatggcatattggagtcagctggtaccagttcctcatttaccagcccaagagaagtcaaaacaaagtcaaagcgcactgcgttgcgatgctgttagcaggaaggagaaagtgagaagggagcaggcaagaatggtggttgataagtagaatctactgggagctcacccccagctcattctttgaacacacaaagcctaagcactaggtaatacctgctacaggtacccagaggccctcatcctcctcactgtctgctccctgactcatcaacagttcccatgtgtcctgcactgagatcggtagattcaacccacataactatgaatgagtctctgaagattgctcccagcagtgtctgtgggactagctcactgccctctgagcaggagttcattttcccaggaagagaactcagacagtggtgtgagtacctttacactgctgcctgacttcagcatctggaatgagtaggataatcatcctatagtcagtcatgaaacagaaccacctgagtgtgccatgcagtttaccttagttctagaaaaatgtgaacacatttaagccataaacatgaaaccttattctatgccattgcaaactcagtagtgtggtcacttggatcagaagagctgcagacagacagacgtgcaggtacctgacttacctttcattcatttagactgtagttgtccttaaagatatagccagcagctcctatgatagaccacacacatctattggttaacagcacagatcatggatccggactccctgcatttacatctcacctttggggacgttgggcaatgtgtataacgtccccagaactccacttccctaactgtaaaatagaaatgaatagtttagcacgtgtatagtacttagaatgcatgtcacagatgctaggtgtggggtgttcagtgtaatcatttgacagccggtggttactgcagagccacttgcccaaccttgattctgagtaggcttttcaaacctgtgcagcagacaataatgtgtagtttcttgggggcttctgctgttcagtcttttacaggtactgacagtttgtagctaaaatactcaataagcctacctaccaagctccccagtatagtttagaattctccccagagtttggccatctctgactacctgtacccatgatttctgtctgcttgtttcttactgagagacactgacccctctacctagtggaatcatgtgaagtggcatcttgccagggtctttggtttggcctagtaggtccttgataacaacatagatgtcggtagttggatgggctggcattcagtgacagctttgtactcctgtcccatcttctgtggcagctccttcatgtctattctcaattgatgtcattactgacttcatggacagggtgaggagcaaatggagatgaatctttcatcttttttctcttctcaaagtataaccgtgttcaacagctattacttctgaacttccttctgttcctggggctgggatattcattctctcttagccaaggctgtcccagtgtctgttggaccttgctctgcttcagttctttctagtcttctgtttcttgtctcaatggcttcctgcttgctccattgctcttgaagaaaacagtttttccttttttttttttttttgagacagaagccacctttaaaattcccctctgcaatgcctctgctgtatgtacttttaaagcaagcctttctatccacttcctcctgaatttattctcatctttgaagtctcatgtagcccaaccaactaaccactgattgatgactttgaacatctgatcatcctgcctctacttcccaagtgccgagagaacaggtatgtgccaccacaccctgtttatgcagacctggggatcgagcccagggccttgtgcatgctgggtgagcacactgccgactaacctaccactccagtctctaccttcacccgcttgagggtcttgtagggctgctgtccttcctataaaggtttagctgtctaagaggcatcagacaattatctatagtgccttcagatagctaaaacagtgttcattccaccccctactccagcacttagtgatgctgccctgtctctgatggagttttcaataatgagtcaccttttctactggaactggcaagatgaagaaagccttcagaatgtcctctcatcctcctcctggttttagcttcagcctttcatatggtattggcacatatgtacaaataccacttctccagctccatactttgagtttcttatgcatccagctacctataaaggatattcagcagtagcaagacctgagccatgtttataactttgggaagagatcttggtaaatcacatgcgtttctctccaaatgtatgttacccagaagatgagctcggaacgtcactccaccctttgcttggagagcttgtggaattgataatgtctgagggatagtgattatcatggcctcagagaaagcctgtttgtcttgggaaagctattttcaagtgtgctgctgttctcccagaagtcatttattgcctcagacttaatcctttaagtggggcctcctctacaaagtctcttctgccttttgaaggtagaaatttattcatctcttccctatgtccttgctattgctgtacacacacaactttctctgatagtatttattatgcctgttaaaatgctcagtaataccttagtcattgaataagtgcatgaatgaaggatgatgacacaaatgttggttaaccaagaagctatttaattcattacttgtggacttggatggatttcctaaaggtgggtatttacatccctggatgatgagaatctcaaccaaatagaggagggcagaagggtcaaggttaggctagaatcacctttgctggactgatggtagctagagtcggcttctattctatgttcacattgcagtttacctctgtaccaaaggtatgatagtaaatagtagagaaagtagaagttttcttgggagtaaatgagatttataacctccaggaagccaagaaatgtgggggacattttcctatgtgcagggctgtacccatattgtttggttaccttggtaatataggggttgtattctatcaactggggatggtcatggtcagtagttctttgctttttcaacagctgtggtttgctgtgcaaagaagcttctttgataaatcccaagagctggttttcatccatggatcaaaggatataggaatttaggatgtagttgagaattgtattagtttaacaaattgtcaatagtaggctttcctctcggttccatgacctcaccagtgacaggaattggttaggtttatggtaccaggcaggaattccctaaggtctgtgtttgctgttttgaaaggctttcatggtatggttgtgtttggtgccttttttttactttatgagaaaatacctgtttcagacaatttaaggatgggaggatttctcttgttcacagtttgctgggtgctgtctactgtgtcaaggaagatatgtcagtaggagaatgaggtggctggtcacattgcatccaaagtcaggaagcagagagagacgaatacagtttataatgattacaatataagaatttcaatagctttcaatgagtagtcatggaaacctaaatttgcgggggctacagagatggctcaggaggaaatcagcctttcagtgaaagctcaagaacctgagttcaagttctaagaactgagaaaaagctgctttttcctttctgttcattcttggaccccagctcaaggaatggtgtagcccatggttagtgtgggttttccttcctcagttaacacaatctagaaattccctcacagacatgccagaaatctggctccaacatgattctagaccctgtcaagttaatggcattaaccattacagtatagcttttgagattcagctatagttttagtggctctgacatttctcctgaagccctgaagcattgggactcattgatgtttgcctgaccattaggattcggcatgttcttctgtctaggcagcctggaagtaataacttcgttcttttactttcacatttttcttaaagcacatgttatctaagtggttaatgaagaaagagtcaggcatagtagtacatgctttgaatttcagcacgaagcaggaagatcataagttcaaggccagtctaggactatacagcaagactttgccataataaatactttttttaaaaggtactgcccagtgtgatgtactcaaaatatattcacaggtaaagtactttgatataagtaaacatagtctgatcagttggagcagtgtgtgctctataacaaggatctgggaactacaattcagggcttataggaagtgatgaaggaaatggggctccagcttgctcagcctgaagaccatgatactttatgtcaagccaggaggacagatgtactctgacaaccttaaagaagtagctttggaaagcagctcttgactctgatagtgatgtaatagccagagctgttgaggatctggcctgtcttagggttttcccatactcctgagtgttttccgacgtaccactgatagcaaatatggcatctgccttgctccatttgatctagaaccaactctgtcactaaattcagtcaagtacagcactgatggtagtcttttagatgtgccaatcaaggaatggtgcagaactgttcttatccagcatccctgagaatgtaccagagtatgtattaaatgaaggccatgctttcctagtagatcctggacaggctataacagtcatgtctttgggattctgtttcaccccagccatggtatcaaacactcaaatgccatccaaagctccataaagggctgtgcatagctagctggatcccttggtcgggatccagtagagggggcagactagggacaagcaaacatcatagaatctagtaacccactatagttagtgatgactttgaagaggctcctgggtcgggggtaagggggtggtggcagagtgatttaactggcctaaagtctagattgaaacagaagtaaaactctgattgtttttgaagtgtgtgtctgtgcacctcgaggccagaagatgatactgttagatctcatgctgtctctcagttctccaccttactcctttgaggtaatatccctcactgaacctggagctcatgggattttggctaggctggtggccagcaaggtccaacagttctcctgtctccacttcactcctgcttcccagaccttgagttgtaggcatgtgctcagcattgcctggctttttagatgagtcctgggggtttgaaccgaggccgtcatactttcatggagagctcagtttaccctctgagccatcccctagcccctcacatttcagcttttatgactactgaaactctttttttttggtttttcgagacagggtttctctgtgtagttctggctgtcctggaactcactctgtagaccaggctggcctcgaactcagaaatccgcctgcctctgcctctgcctcccaagtgctgggattaaaggcgtgcgccaccacgcccggctgactactgaaactcttactgtattattataaacatgtatgtagcacaaagggcttagagtgcacagcagatgtttgttaagaggaaaaaattgtggccatgaagatctgacccaaaccacaggcaccttctcggggcagtggaaaagtgaacgtgtcttcagctgtgtgtgccagaggcatgactccagtccttggcctgcagtgcattctgggtggtcatttgggcctttcttatgttcctttccagcctgaaaacatttggttattgttcctgtggcttgtttgtacggatctttatagacacttcttagatgttctgatcagaaatactgcctcttgttctcttgaacaaaggcggcgggggggggggggtttaattaaaactttcaggagtgggaattaacagcctctaactgaaccttggtctctgggcttagttagacaaagccatttaaatgatttccatattcttctgcgcattcaagggctgtttataatgctgaggaattaggaaagcttcctgctttaaaaagtgcattctgtacttttattcccacacgttttttaatgtatgctgactacctaggtggccctcactgctctgtggacaatcacattattactgaatgaactgggtatctgagatgaggtgacttgcttgagatggcagcctggctcctaaaactacctggtctgtcctcttgacagctgaggagggggcagtaggaactctgagaatgaatgtggaagcccccgtagcatattagggttcctctgccttgaagttcagttggacagtggatgggtggggcccagagaacctgcagctttgagtctcagagctcccacacctgcccatgtgttcagctgtgcaggacatgcaagctctttcaatatagcctttttaataggtaggcttatattcttatttacctatcattgtgcatctcccatttcacccatatcttctggtcttcagtttctgtttttcttatcccaccccaccctagtacatgcctctgggtcagtttattcttgtattcatctctgtcttcaccttcctggaggcagacaggtggtggatagaaagccagcctttctacacacaaaggagactcactgcccctttaatcccagtacatctcacatagacacgcccagagccgcacatcagctcttcctatgataatcctggttttaaccacagtggttttagaactgactgcctggttttaaaaattaccagcgcaagcaaatctagcaagggaagtcagaattcctttgtaattcagtattatatgcaaattgcaggaattccttcctgtaagtctgttttcagagtaaacttcagggatcatgtgagacagatgcattagcaaggcttttggttacagagaacagaaactcagtttgaactagtgcatggactaacaggaaggctctgctttcagacatagacagggagaagagcatcctggttgtttggatgattagtttctccctccatccctctctcccctctcctctttctccctgcctctctccctctcttccccccccccccttttcctctttctctcttttcattgactcctttcttctttcctggtttgtgtgcttccccttccttttctgttctgcatgctcctttataactcatgactcctggcttcaatagaggtgatgctcttggcccacattggacaagtgatgattccatgaaagcagagttgagaaggatcctcagccaagagtaattaatccaagctttcttcatttcttttccatagcaaaacagcaagggcgaagttgcatagtctgaggtttttacaaatacggaaggtttctttttggagacctaagtactcctgatagatttattgctgactaaaaatgcagtgttctacaagatgtaaaaagccattttattttttgtttgccttcaacttcaggctttctgggcaggaggaacttatccagagtaaacatgtcagagctggagaggtggctcagtggttaagaacatttactcatgcagaccttggttctattctcagaacctgcttagcagctcatgactgtaactccagttcccggggaccttgacaccctcttctgacctgtaagggcaccagacacacatgtggtacactgacatatgtgcagaaagaacattcatacacataaaaagtaaataagttaagtaattctttaaaaaagaaaaaaagagtaagtatcttagctctccagggacagatatgaggggtttaacaggaacctgtttggtcagtgttcttatatagagacccaaatgtctctttatgcagatactgctcctgctggaatcttaatagccagttatgtcctttttggacacacataagcttttctccattccttgactgttcatctagtagctgagcctgatcaactatcaggatacatctcaagatccccagccaaaaagaaaaacaccgggctggtgagatggctcagtgggtaagaacacccgactgctcttccgaaggtccagagttcaaatcccagcaaccacatggtggctcacaaccatccgtaacaagatcgaactccctcttctggtgtgtctgaagacagctacagtgtacttacatataataaataaataaatctaaaaaaaaaaaaaaaaaaaaccagcatctatggcaccgcatcttcatgaaacctgtcatactggtgtttggaaacaacccacccttaggctcaaggtgtgtgtttgttcagccccagtggtagttgccaatcctatagaaaatgagatgacctttaagagaagaagcgtgttgctcctgttcccaaggactttggaccaagactcccgaggcttagggaaggtgttgaaatgatggctctcctttttgtcttgcctctgagagatttgaggttctgtttttgtttttgtttttttttaaagattgtaaaaatgttgttttatgtgtatatatgagtgtgtgcacctaaacttgtacaccgcatgagtataggtgcccatgggggctagaagggggcatcagatttcctggatctgcagttacaggaggtaagcttttaaatattggtgtagggacatgaacttggatcctctgcaaagcagaaagtgcacttaaccattgagccatttctccagtctctgagactgaattttaagggatggagtctctgagtcccagtctttaccctatttttgaaaggacactttaacgacgatggtgaaactttacaagttcttgatgacaaacatacaagaaatctttagagacccttcactccttgttccaatttaattcagtgatgtgaggtgggtggtgtgtttcactaaatacagcattccttagttaaaatgcaagaaatttgcaatgtcctttcacagtgtaagttttatacagatgccccttccccaatatttttaggtaattacctcaacttacagtattaaaacaggttttttccatttatacctatcaatctgtctgtctgtctgtctatctatctatctatctatctatctatctatctatctatctatcatacaacatggtatacagcaaaggacaactttcaagagtcagggcttttgccttttaccatggggattttggggatcaaactcaggtcatcaggcttggcagtaagtacttttaccccctgagcaactttgtcagtctaagaagtatttttaagaaactcaaagtctcattggcctttatctcatctctgcccttctgtagcttcaccacttccccagaagagaatgctgatgaaaagctatgaggtagcctggaagcctttctgttgttttccttacactgtcagtagctgtggagctgggctgcatttcatcatcacgccatggggccccttttgcatttcactttgttcattacccatcttgtatgtctatgctaggcataaatatgagccttatgtttgaaatgctgcaagtaagtggttcatattatggacgagacatcttttgtttaactactctcctagatacattttccaactgtgagagttgtcacacagtcaataaaacaatacccaaaccaaattttatagttgagctatccccaaattaagcccatacaacagaacacatactagttaactacatagtaatttgagcatatgatctacttgctccatagttctttatctgttgaatgggtataaaaataatgttcacttcatgagttcataggaagaaatacatgaatgactgtgtgagaagtattgtgggcaatgcctggcttctgctatgcactgagggttctgtgcttgaacaatactgtgttgatgtctcagagctgctgtgacctttgctgtgtgtgttttccttccatctattttgtaagcatcccaggaaagcaatgagttttattactgagctctgtttacagtatcgtcctaggcatagtttatcccattacacaaagtctctctgtgaagcatgagcaattcctttcttgcccaggactgggtagacctcctctaggtggtcagtttgatttccaggtagtgagatctgcctggatctcactgtcctgatagactggctctgctcctgcagtgattcctacttgtgtgctgcaaactctgtggtaggcattttctgtactaactgaacttacgactctaacttattttcttaccataacttttgggttagttagtacaaatagctgcttcagccggtgcctgtacaggtagaccttgtattataatgagggactggtttgaatgactttcgttattaactctgatggtatgcactgttcccagaaaccaccagaggcctagacaggatagtatctatgcaagaaccacctaagttctatgagtgccacctgcctggctttcctaggtctctcactatgggagggtcagagtttagacatggtgtcagtggtacacagtgtgggagagtaagagcctttactatttatggacatggggatatgtggcacacataggggaatcacataaagacccaggaacaaaggcagagagaatgaggtaggatctgggcatcatgcaaaccggtttcccatgggaagccttaattggtgggtttaaagggagcagatgtaagatccagccagagagatagcatccaccttcagtttgctggcaggtgtctaaatagtgcctctgcatgaagtggtgggaaaagagaggcttccaagttatcactggtctcccagtcagaaccattctggctttgtccactactgcaggctgtcagtggtgactgaaccttactgatggtatgggaaagttaggcttgtacttaaaaatagatgctaacagctgggtctcgtggtacatgcctgtgatcccaggactcaggaggctaaggaaggattgcagtgagttcaggaccagcttggcctacgtggtgaggtaaaggccagagatatatggtgaaacctttgactcacacaaaacaaacaaaaaatggtgtcatttttgggtgtgtgtgtgtggggtcagatctagaaaatcaaactgaccaactggtcctgggcaagaaacaaagggaacaaacataaaattgtagcagtttctgtggggtagcctataaataactgaatacagcacagtgaccatggggatttgctagagtctcctttagcccttggtcttctcttatctacttcctgttggacaagttgtgattctacggatggacagtgtcatttataaatgtggttttgaccttggaaggaaacacatattggtgacttgtaactttcccctctgccttctgaaaagccccattataagccttttatcgagagaatgtgtcctgctgctaagagctgtcttcttatccagttcaggaaaaaaacccaaaaccaaaaaaaaaaaaaaaaaaaaaaaaaaaaaaccaacaacagtgctgattctggatgctgagcagtctgccatgtgggtgtacctagagtatcagctactcaagcaacagtcaactgccattcacaaagaagccattgtgataatgaaggccctttgtctatggcgtgaaagagattgtataacagtggatgagatggtgcaggtttgggctggactggaaggaaggagagtggtgtcaccaggtgccacgtgccatcttaactgtgccccaggctcaggccactactgtcccttcaacagaatcccagtgcttctctctctggtgaggctttattttgcaaaatgcttactccccatgctgttctaggttgggagtggctctgtcacttgtctgtcacctggaatggaggactgaggaggtgctcgacctctcagagcaaggttggagagcccactctccagcctgagatgtaggaggagctaagcttcctgataaagtgtgccacccctgggcctctcggacctgcccttttgcacaattgtgcttttctcccgtgataaacacctccctcaggaattgatccctgacactagaccagcccagattatcaggataacagctttcccactgagcaaggggatctaccttttcagacaggcgaccaagaccaaccctctctctgcacgctggttgtggatctttggtttcagccttttattcggcatggaggcaggcagtaagcatgggtgagttggggtcagctgaatgccattaggagctcttccccaactccccgccaaaccctacaaagtgacagctactgcatctggctcaggacagtttgtagaagcgtctcctcctctaccactttgtaccctctcccttttcttttctttctagtttctggtcactccacgtttattattttccctctgtttcacgttcactctttgcgatcccctgggtgttgtttagattcctctcaaacctgtgtcattgcagctttatgctgtcagcctaagcatagctgagacatgctatgtggcaatgctcttatcatggctccgtttggagtggtccttggtttccttggttctctaaatgactgtgatgtttagggtgtagtgaatctgcagaaccctgtcagggaaagttgaggagtccaagatcattgccctactttcccccacatacgtccttggcaagtggtgctgtctctagtctccacccagagcagacccttcataggctgtgcttccggctgaaccagacccagcatgccccagcccatcaggtcaagccctgctagttggttggaagctctctggagtcccttgtagtcaagggtgaggtcatcaggggtggtttcaccatgttctaggacacaccttttagtggcatgtggtctggttctctgaattatctttaaatcagttttcctgttctgggattggttttgcacacagcatcacagaaactatccttataaactgcactcattgtgtactacatttggaagtgggaagtgtttttctagccttttaagtgtgttattttttccccctcttcagtcccaggtaaatcaccacggtgctgctagtaatgaaacctaccaggaacgcctggcacggctagaaggagataaagagtccctcatactacaggtgagttctcttcttccgcagcttccccaggaaagggatgcacagtgcgagtcctctgttggaaagcgttgggaacccatttatttatcctgtgctgccgagcatctacctctgcacacttcaagccctgtgggcaggctgaaactgggtgccagcaatgagcaaaatgggccccgtcatccaggagcctgtaagtctgctaagggagatgagtacatcttgtgtcactaataaacctgagccgcgagtgctacaggccccagggagcaggctaatggaatcaggtccatgactctgaagctggatccagacatgtcacttggatgcagatctcctgctctggtagtgtgagctaagcttttactggctctcttgcctctataagaggagcagaactttaaaacttcttgtagagagagggcaccaaaacagcctctggctttcaaaagcccatgctctttggtaggatataacattgggcgttcttccagagagcttatactgcatcaggaactctttgttgtgttattcttcaaatgtacaaaatcatatagcaaatgagtattaagggtgggctctgcatcacatatggatagacagtttggagaattagagattaatttcagcttcttacaaagcttgaagggtgatgaataagtctggtgatggaggctagggatgcatttggtagagtgcttgcctaatctgcatgcagtctctggattctatccccaatgcactgggatgttgcacacctgtactcccagcatttgggatgtagaagcaggaagttcagaaattcagggtcctcctaagctacatagaaggtttgagggatatgaggatcccctcatcacttacacacacatctaacacaaatgacttgtggtgaaatggaggaatggggggcagttggggtctgggttggccccagggtgtggccatcattttggagcactagggatggtgagatggtagtacacttatttctttctcattttatgttttcattttattttataaacataagatcaattagttcttgtagaaactggaaattctgagaatatcaagaagcagattaggttaacatcagccctttggttgtgcccctctcaccttctttaaaatgattgagctcatatcaaatatacacttttgtagcctagttttattcttttgtttgcttcactgacttttaaaataattaaatcattataaagttattgaatatctgaatttgtcagacattggcttaggatcctgtgggtatatcagtgagtaaaatggtgtgtgtgtgtgtgtgtgtgtgtgtgtgtgtgtgtgtgtgtgaaagagagagagagcgcacaaacctgagccaattcctaaatatttcaggtagtgataagtgctatggagaaaaataaacggagataagcagtgtgcagtcaggagctccctggcaggaggaagctagggaggcaaccagagatacctggaggagtacattccaggcaaagctgctggtcagcccagcccacccacagaggtggagtgtccttggtgtgtggacggaacaacaagaggctattttggctggggtccctgaaaagaaggggtgggacccccttggtgagtagcaggggcctgtttttatagctcaggtcccttgaggtatgtgcagtttgacacctcatctccaagacatgattcacgaaagaccattcagtttagaattatgtagcagggagtatgaaattgcaaacttttgaactaggaccctctgtgagtgaaacaacacattgctatttagaggggattataattaatgaagaagtctcatgtaatattgctccctttcacggtcatttctgttctcagcaaattcttgactaatcccttttaaaataatctgaacacagttgagctgttgactactaaaggtgaaagttgaccctcatggtttctgttcctccaggagctgtgggcagaccatcagcaactcttccattctcacttctgtactgtcactagtggcctgtgaagctggtttgtcagcagggcatggcctcttgcataatccatattacagttgagtcaaacgaatgagttggaggaacccttagcccagaataagttttcccgggtttatctgtagaagaacaagattcatgtctgtcccctcccagtacctaaaatgttgtttactatagggctcaaaagtatttgttctcatagaacgaagataaaattctaaaatctttagtgccagtttccatacttcctgactcaacagtagagttgatctgaggcctagaacaccccctgtagtcccatgtctttggtcttaggtaaagttgacccatgtggcctgtactgttccacaaccctaccccaactgttccttaagtatggtgtagctttataaattttaatctctctagtagggccaaccatatgacacctccccaaatagaaaccctgaatcccaagaagcacaatcatttcccagaatccctctcttttgaagaggagttactagtagaaaagaccagtgctgctgatagtatttaccaacaaggaccaaaaccaaacaaagtaatacaactagagacgtggctcagcagttaggaacactgatgattcttctagaggacctgagttccattcctagcacccacaagagccccaattccaggccatctgatgccctcatctgtccttgaagatcctgtacacacatacatgcaggcatatacccagacaggacaaccatatacataaaattaagaaatattaacagtaaaataaaaccgtacactggtgtgttgtttaaatgggcctggttggtgcaagaagcccatctttggattattggaatgtcagtacactctgtatcaggtacacgtgtttcaatcattcactcattatttgggtctagaagtacagtgtataaagtgggcaggcttttctatatcttccagaatgggaactttctaaatcataaaattcatttaaacacttataaatgaacttattcatgcttcattaatcattacagaatgggaaattaaggagactaacctatatataaaggaccgtgtcttcaaccaagaagatcttgatttactattcattgatttttttttttttttttttttacctttctggaaggtcacccatgatctttcatattcctatatggaactatctcataataaataaaacatagaaaggatcctagggatcatttgggtaatagaaaaggctaccaaaaacagctatattttaatatatatatatatatatatatatatatatatatatatatatatcaaaatgcctttgtttaatgtatttttcttagtatttgcatagacaatcttagggttcctcagaaaaatgccttcttctgccacatgtgtgcagtgtggctttggtgtttatatgacttagagtcatgttttgacctgtaaagcacagaaacctttctggagccaagttttgtcagtgctaatacatgccctttacgtcctacattccttaattgcttccaaacactggcttgataggtgagcagtccccacacccgtatgtgagaggtaaggtcattggttggttttcataaaggtttgaatcgctcttccccatgaggtggcagagccctgccaagagctgagctatgccttgaagtcaggctgccttattagaggaacaaggagcaggagtccagcccagaggcagctctcttgtctcttgggtagctgctttcctcttgagtctgttaagagcaggaaatgtgaccacggccatttaagcagtgggtaagattccctggtaagaaggtgaaattctaaccacagttgctttcctctgggacacttcctcaactccactcacgtaaaagagaggccttctgtcaggtgagtctgagtaggttgctttacccacccaacaatgacgacttctctgcaccccacccccaccagtctagatcctccactattgtttatgttctctaacaggtgagcgtcctcacagatcaagtggaagcccaaggagagaagattcgggaccttgaagtgtgtctggaaggccaccaggtgaagctcaatgctgcagaagagatgcttcagcaggtacggacaggtggagtggagggcttggggcctgaagcagctccggcgttaaatgcccctttatgggttccttcttactctcccatgatgcctggaggtggggttggctgtgcactgtgcaatgtttagacagcaggtgaaaccaacctgaacactgagggcggggcggggtggggcggggcagcccagtggggaaataacttgttgagctggttagacagagtcccaggagcactttctgcaggccatgtcgcctcatcttatcatagaagctgccatctgctagggtggcatctgaggttgtagaaagtcaacttgttagtgtatttatttttgcactcccccctattctatccctccctttgtagtttcctccaattaaaaactatcacacaaataccatgttcctgtaatttagtagacatcaaaaaggaaagcagtagatagctgtttccatactttgtaaatagagtcctctacttatgtccttttgttgattccagtgtatatataacatgatatgcaaagctatagtcctaatggagggacagcctagtccttagactataattaaataagatgtggcgactcttccatttgaaaaatgtagctgtgtagctatctctactaccacttacaattattttaagtagagatatcaaaattgacctaaccattctttattctccaaatagttgtatcactgtaaaaagtgagctgtggctattccgagggacgatgagttgtggagagtccttaaggtctgctgagcacatcactagacttttggttcagtctatttattcataggtttcctttgcttcagtcatcctgtgttcttggctattttggaaattacagcacactggaagtttacacgtctgtgacgtgtgtgtgctttgtggctgttgatagaattcctgccatagggaagaatctcaccttctattcaaaggagagccattccctcaaaatgatcagatttactgagatgactgatcgcaatcctctcctcaaggctccagggtttggttttctaactgtcaagttcagcttgtgagcacaggctttgtgttctactgctggcctgctaagtgtcagcgtttctgggtgtgttagttttgtatgggtggatttgaagaatttagggggaagaaaaggtaaatgagtatctcaatggacatgtttttataaaattgacttgcaacagcttggaatgttgttattaactttctgtccttcactcccgattaataaattacactattctgtctcagtttgattttgtttagattctatactatttttcatacttagatttttttttctgagaaactatgattagcaacaagaggtcttttatggaattaaaaaccaaattttgtcttttaaatatctggaaaagaaaatagtctgattgggaaacaatcttgcatgaaacacatggggatcgagttttcaggacttcctgaggtgtgtgggggagggtaaggcagatgatagactattgtaaacagttcagaaagagaccatgaaagtgactgtgtgagaaagtatcagagggctgccgtttcaggaaggtggtacctggctagaagccaagctagagaatagctgcattgtagtgctggagctgtgcacctctctgtgctgatgctttcacggctgctctacttcctgctatgacagtgctcctgtcaatcaaggagctcaatggagggaggtggccagcactcctgggcagaggctggcttacctgtcagcagtgtcacacagaaagcagttgagccttttgaaaaccttaggtcagttagcttttgtatcctatttcttctagttccattgctcttcccatgtgcttatgagtaaggtatcaggcaggcattggtttgctacccagtattgtcattcatcatctgctataatttgtcccttctagaacttgactgactaagttctgtgtctatgactttcagtacagtctctcaatcttgtaagagtagcatttcataaaggttacacatttaaattgtgggatgcatttgagccttagctcacactaggtgtttgatggacttggtgttccagcactggatctcaagttcagtattactgctgtcctggaatctgtccgtgaagaccctgggtcttacaccccagtactggtgcagtgttgtttacaacctggagtagtataggtcttgtgagctgggggcaggtacagacttgctccgtctggctgagatatccttggctgcagggctcttggcttctggtgtttggaacgagaatgactcatgacctagaggcagagaatggacacaatcgcttctttctgcctgtcctgccagacctggcccattgctctgaatgaagtctttccctgtctccagtagggccttctgtttgcctagaacccagcacttcctggggatgttgctggtccagataacactgtacactaatgcatccggtctaaaggtaacaactgttttcagtgctagttcagtgcctttgtgaacccagtaatgcaagatattctagttttgttattttacacagaggtaaacattaaagatttaaagatatcctaaaaatttttcaattcatttcagttttgaaatgtcctatgtgaacctcagagtaaataactgtaggttgtgcctggcagggagacctctagtctacaatgtatgctgtagacttcccatatccattggctacaatagcactgggagactatcttagttacttttctgttgctgtgataaaacaacatgaccaaggacatttagaaaagagtttatgggagttcatatctctagagtgttagagtctaagaccatcatggctgggaacatggcagcaggcaggcaggtgggcgtagcgctggaacagtagcctgagcgcttacatcctgatccacaggttttaggcggagagagctaactaggaatggagtgggattttgaaacctcaaaaccaactgagtgacacacctcctccagcaggatcacgattcttctgagatagttcaaatacctggagaccaagctcatggggagcggggaggtcattcatttaaagcagcacagggacttaagaaaacctcgatgcgctatgcatagttcaaaccctgcatgtcgttcagctccagcaattccactgagctgtcctttcccaaatgtcagactccttccaggagcccaggaggaagaggtatccactcacccaactcacaggcaggcctcctcagatgtcccgagactgcccacctgccaggtggcatatctaaacatggactcatccagtctccaggagaaaacacaaagacctctcttggtattagattaaaccacaagtagacagaactgattcagggccaggtctacctagactgcaagtatacttgaagataccttggaaaggaaggaaggatgcaaattgtcctgactttgtgaagccatcatcctgctctgagaaatgggggacaacatctgtgtgtttcaagcctccagcctgtcctagagccccagggtttatgtgaaactgactgagatatggagtgactgggagtcagtgtgcctagatgttgatctgggaaggtcaataaatatgcttttatttcttttgatttatgactattattgttattgttagtgatgctagacctcgtgcatgctaggcaaacacagccactgagctctggctctttgcttccctttcttgacgagaatagggatgaagtctggattctaaattgtacatttctgctgtttcctcataggagaataacctgatggtaaggggcagggtaattgtcaaacagcacgcataattgcaggtcctaccctcagcaagcacagagcttgctggaaacttctttcaaggcagcatggatgtgatggagaggcctgtgccagtgaaaggaaatcttattggtttagaaagttctagagagaaacaggaagtacccagacctcaagacaaagacaaaggctacccatggaggtgtcttagcacttatcaaaattatgtaccgctattccagttttgttaaaaacattttcatgcaaatggccaagtacctgaagacactgtgcaagggttttaaggcctaggcacaggccctgtaatatgctacagaatgaagatatatgtatatatcataactctacacattctggcaggcacaaatacctatctgaggaagtgagataaggcagcaagtcatgagtgagaaaaatgttcattaattctctaaaacctctctgagagattttaagacacgcatacctagtttcttcaggtttatcaaaattgatgttgtatgtctagacattagtacaggtggtacatcaacccatgctgcaggagaggctgtggtttcaaagagactcagtcagaaatgagcctcaagtgaccagagtaggttgggggacccattttctgcagtgttcctcgtgagtctggcttcctggcaaggccagagcctttgacttcaaagggcaaagggactgggttttgctttcttgtctgtccgcagcctgttctttccttctggtttcaggttgctgggggggggacgggggacgggggacggacggggacgggggatgggacgggactacgatcccctgtcattggtcagtaattccctgggtcatgttccactcctaaacatggaggtaattgcttcaagatgtggccctttatagagggagagaatgagttgaaaggcagatctctttttttatcagctccagtcaggtcctgagctttggaaaaaaggaaatggctgattgctccgagatgtaaattcacttttatctctgagaggggagatgcccgtgtgtttctggaagaagttagtggtgacggggaaaagagaggggcacgtagtaattttgttcattatttttctaaagcatccttacccagttccacagtcctcccagtaagtgaaataagccatccacacccctcctcctccttgccctcctttttttagattgcaggcaaccttgagatagtccggggcacgaagcccagtgctgcgtgggaaacttgttccctctgcattcaactgctgcccctctccatccatcatggtagctgcaggacaagaagcagtgcccagtggggtcccaccctgtaggttgggaaacctgggcacatttgttgctccagacaggcgggttgcacccagagctgacagcagtgctggagtgacaaactagagggacccaaggacattttccttagtgtagacagaataaaggtaaaggcagcagaggagatgggagagcaaagtgagcggtcagggacacctgatacagggaagatgaagtagcagacagccacctctgctgaattgactctgtggaatctataaagggcccgatctataagctatggctaaagtttagacatcaaatccaagaagtaaaactgttttgctccctacttaggtgaaggcagaaggcaggctacaggcagtcagacatcttgttgaggagtgaaaggaggaggaggcgtgggggaaaggggtaggagagagtgttctttctctttccgtcatacactcaggcactcgtgtgtacacacacacacacacacacacacacacacacagaggcagcatacatttacttatgcagagaatgcagggacagggcagggagtccagaggcttcttcagaatgtcagaaatttgatcatgtttatagcccaaggaatgagagctgatggtgaggacaagattaaatgccggccagagtgcatgattgatggtcctatcccagactagcacagagcgtggtgggaactccttccaaggcagcacaaaggtgagggagtggctaggtcctggtgaatgggagtctctctgagttcgagcaagaggaagagcaggggactccaccaaagactactggttacctgccaaggtaactgatattcaccaagtcctgtcaggatgggcagaggtaggaaggtcagtcaaagtggtacacttcagaaacaaaatcctagaagtattatgtttttgttctttctctccctccctcctctctactttctgctccctccctccctgccccttctccctctccctctctcttccggcttcttcttcctttcccttccctcttcctctcccttccctctccctctctcctccatctccctttccctctctcttccctttcccttccctctccctctcccccccttttctttctgtctctctgtctctctgggtggggatttccctctcttccctttccctctctcctccctctccctctcccccaccttttctttctgtctctctctgggtggggatttccctctctcttccctttcccttccctctccctctctccttcctctccctctcccccaccttttctttctgtctctctgtctctctctgggtggggaggagctgcagggtcagtatagcccaatctggcttccccctcactcagactctgagtgatagggttacagatgtgtgtcaacacactcagctttctgggatagaaaatagatcatgaaaatgagagaacttgacagagacaatgacagcatgtagtctgtcagactagctttagaatgaagtgtgtgtgtctgtatgtatgtgcgcgcgaacgtgcacactaagatttaagaaagatgaatgagctaacagtggaaaattctgaaataaaaagaatgtaagtttagtgaatggtgataggcttttattgtgttgatagataggaggagaggttatttgacaagagcacattgtgggttgtaaggcttagaggcataggagagatttggaactgagaagaaccagccaggaatgagtagttttaccaaatagtattggtagataagctgtaatcagatatggtgagtttgtattgaaactgatgggtatgattaaattactttcagtagcaacactcaggtcatcaggagtggaaacaaataaagactgagatttggctccacctgggcccttgtaaacaaaggccatcaggtctggggcctgggggaaatgggggaaggattgttctggtatagatatgaatacaaatgcaatgacaaacctggaagtacagagtggccagggagacaaatattgctaaagaaagttgatagaccaggaaaacagggagttactaagtaaccagtggacacagaagaagaaattctaggttgagggagcacgggggatagctgaaaaggtcaggcgagagaacttgagagctaaagagttaggagacaacgcaaacacattctgggcacagatgaggacctagttgtgaccctgacgctgagaagtaaagtctccaggagctgaagtcggtgtgaagctgaacagacggatacaggacggagcagcggccgttcacaaggatgctgaagctcctgaggagacgcagattgcccaatgtaggtagaaacgccattgatcaaagacggatgcctgtggggagtggaaactgtcttgcttctggatatttgggaaaatgtgctagacctgagctgtgctcccttagaatacatgtgaatgattgatgggaacagatcgtgaggcatgcctgattatgggagactggtattctctgtgagctgggttggaggcagtcccaaggtggagagatgggtgtgctgtaagttgtgttggcgggcgcagagtggtctttgtctgggatgactggggagaggggaacatacggtgtcaaatcctcatgttggacgtaggaggcagcattgatgctgcaggatagctggtgcctgttaagttgtgccctttggagaacctggttcctatcagtggccaggggccttgctgggtcttgagatagagaactgagctaggttggcttaaacttgttgaaggctgactttttttccccaacaacaatgaacattaaattcttttttttctttctattttttggtcttttagtagacacacacacacacacacacacgtacgtataatgtaatttaatcttattcccctattagcctctcctgacccacttctgatccctttcataccaacttgcactttaatgtttctttttatgatccagtgagtgtttcaaaacctctcgtactgtagctcagtggctctcccccataccctgggtactccttttccctctccctgcccttcctataaatcccccctccccctaccacagcttcagctttctttacagcatgtgcatatatgattttctgtagctatatacaatctaggtcccaaacgcagagacaaaatggatgtttctgagactgaccttattgtttaatatgattatttccagtttttacgagtgacataactgttcttctttatggatggaaacatttccattgtgtatatgtatgcatttttaaaaatccatttgtcagtcagtggacacccatgttggtgacatagcactgttgtgaacagtgctgcagtgaacttggcagtgcagccgaccgatctctgtgatgtgtggacacaaagcctggctttttaaattcaacagtgattgttcatgacgaggataaggcagagatatcaacaaaaggcttggaagaggtaaaaacactagggatcctgtccaagctttaatatcagtgagctgtcatcaattaaacaacctcagatttccaattaaaacttgagcatgtccagcacgaatgtccacttggaatgtgagcatgaccaattcaaacaccggcgcgactaattggaatggctattggaactaattacagcactgtcttcatcagctgtaacattggtgtgactaattacaacctgggagttgaaacaactgggggaatctgaccgtgctgagagcagaggagacttagatacactgtaaagcttttcaaaggttcaccaaaaccctgtctgggatgctgatccctggacagagtgtgtggatatcaccataagatcattccacggcccacaggtgttgtgctttcaattgtcatattcctaagtgatggcttctggtaggtgtttaaaaaaacaaacaaagtcttacagaagacttttttcctccttagatctcagcactccaaaataatcgtccttatggatttcaccttgtaggattgtccttttgtccctgcatgtaggcagcttgggaacttgtgtatctacatgttgtggttcatccctagctgtttgaaggaatttattagtttcttactaatgataatgctgccttcaatgtctcctcttacctgctttaacttttatgatttcttttgtgtatgtggtgtgtgtgtatgtatttgtacatatacaccatgacatgtatgtagaggtcatagaagagcctatggtgttatttcttgccttcccccttgtttgagacaggtctcgtgcccttgtgtacataagactaggtactatgcctgaattcatgcacttttctgtgtctgcatcccattttgctgaagtagcatcaggagtatagacatttgctataagcctagctacctactacataggttctagggatctgaactcaggtccccacacttgcatggcaaaccctttaaccactgagccatttccctagcccttcatatatttttaactaggaacattcattttgtaaatcaccttaaattagttttagaactaggcatgtagatgcaagaatggactcagagaaccaggtgtagaaaaagagggatatggggagaggaagtaggagagaataaatgataaacaaggaagatgattaacatcttatgaacttcacatactgaaggccaagagaactcattattttggtgtgccctcccacttggggaagaactgcttaaggtactttccatcctgctcagcctcagcaacagagttctctagatagtatgtgttcagtgaaaccatggcaacctgagtggacatttcctgggcttagtaaatatttgttgactgctctttcaacattttgttatttctctttaaatccttttattcacaacatacctctcccactccagcttgaaaaacaggatgatatgtccaacagaaatgaattctgaggtcaaataggtggtagttggcaaactagttctgcttaggactggcattatgttcttgcccagcagatttgcttactgtccttgggtctgttttctcatctgtagagttaggatgccaaggtttgctgccaaatccccgtggaggtgttttaagagaatatgtacaaaaaccagccagcaatctctgctgcaaagaaggcactcaccaaagtcgagtttgtcattaccttggacatctcatctgactgattccttggggccaagcagcccatggttctaatgctgtagtgttcctgatttttgccctgttatccagcctcatgtctggctaagcaggaagaacctgtttctatggcccaaggctcaggaggacttctagacacccagttagtccagtgggtttgtagctcagagtcatcagggactggtggcctttagggttaggttagcgaagcatcaattcctagtcaaactgccttttccaaacagtgtggttttattcatgatggctggacagtttgagatctatgagatctgagatcatcattctgtgagccagggttcggttgcctgagatgatacacgatgttcagatgacgcaggaggttgttcctttcccagttgctcttctggttaccgtgtatgtcctcagtgctaggacctgcatggacaagggcataccatgcacgaggatcttagccaacaggatactgccatttgctgatggaaaacgtactgcaatctggaaatacttctggacctttataatgcctcaacagctgtcttgtctgtatccttttgtagtttcctcttgtttgtgtttaataggtatattaatggcaggcttggtgtccaggagctggactatttggttgtcagctactattctagtgactgctggaatagaaataatgaccttggtctttccacaatagcagggaataagcttatcttatagtagcctggctgtaattttggtatagttcaggaaagagccatcccacaggaccattcttcaggaatccactcaatactctgacttctctccggatgtattgtaaatgatgttttatgttgagatttgtagaagactaaactgatccttgattttacccaggagctggtctagaacgttctattttcaaaaactgtgttgtcaatatgaatgcatatttgtttgttctgactgagagggattgctgcgccgctttgaatgcagggatgggaaatgttcatcctttgagagtgctcattcattttctctgaacataattaataatggttactatggagaaatatgttttttgagaaatgtctttcagagcatgctgggtgatgtcaggggttgtgctgtccccaagtaacctagggtcagtcaaacttctccctaacacacccgggctgccatgcagtaatcctcaccctagctgtagaaaacacagccttatatgctatggatggaacagctgctgaccttgttgccatgggggcttatgatgctgagatgcatttttgctttcaggagctgctaagtcgcacatctctggagacccagaagttggatctgatgactgaggtgtctgagctgaagctcaagctggttggtatggaaaaagaacagaaagaacaagaagaaaaacagagaaaagcagaggtgagtgtaattgcaccatgtggggtaggggtgagggtgaggcccgggtttatgtacgaggctcctaggccatctggccaactgcagtcccagcagccactgggtaccaaggaatatgcatgcactaaagacacaatgatctgtttaataccaagttatcaggttttgctgttgctgcacatttcagcaatgcacaaaccgctcagttttggctttcttgttctgtcctcaaactgctgacagggatggaaagggaagcagttgagaggagggatcagatacatgtggagggacataagatgccttttgtgaaaactaaggtaatgacagcaacaggaaggaaagaagccagccttccagcaggcctgggactgttttggatacatattgccccccaagtttgtgtgctttttttcctttcctctggatgggctgtgtggctgagcctacattcaggccatctctgaaagaatgtttgcttgtattgtttttcagactccagatatcattgactagaacatgccagtgtctattgggtagagtttagagagttttaggcccacaaaaccttctttaaagaatcatcatgttttcacttagataatctcattcctgttctatgatcacacctgccgttgtgacccatggaagacggtagttttacatttcaggaacctttggcttatttactgacttatctacccaatagctctctggacctaaacaaattagttacataatttgtatgtatatcaatttgtttatctattaaaatagttaatgtctcaaagacaattaaatcatagatgttaagtgctatagtatctgatcttttgtaaacacttggtttacattcagtcttctatatctcaaaaatcaaaagatggaaagtggtcctttctgataagtgctgatattatttgcacaggcatctgccatgcttttttcagtttatggtagaggttggactactaatatgccagggggtgttctttgcattgattttgagaatgtttcaaagtaagatgtgtaatggtcacaagaaaagagctatagtaagctgtgtacaggagctcctattaagaggacagattgtatggtggcgcacacctttaatcccagcactcgggaggtagaggcaggcagatttctgagttcgaggccagcctgatctacaaagtgagctccatcgcttctcggccttttggctaagatcaagtgtacaaagtgagctccaggacagtcagggctatacagagaaaccctgtctcgaaaaaccaaaaacacaaaagagtacagattgttggatttcatatctggctttgagtcatgctcagatattccttagttttgaactcctggttgttaatttaactcccgaatccctagttttgttttttgcttatttatttctataaggtggtagtatagtaatgcttgcttgtttccctagacattctgagatctgctggagaacttgtgtatgtcgcccttaggttagtgaggaccatgtcgcagtagctagcttttattgattacttacagtgttgttcacactgacagtacaaatgtcgattgtgacacattattcaaatgcgcagagttcaccgagactgaaagctgatctgtatgtagggaaataatcggatttcatgaattaggcattttatcagtgctctagggtatataatatatggggacatacgttaggggctcagaggcagagttcagtgagctctgtgaagggtgcaaattgtcagagactcagtttaaagccataaggggaaaagagggaaggggaggggaggggagggaaggagagagaggggagttgataagttgatggaagtctagggttaaagtacagcatggttagagctagacaatttcactgtgcctctaaaatcctgttttagggcagttcttcatttttctgtctcccgtatccttaggaatgctaaccccttcataacaaagatggtcatctgtagctctagaatgacatctacagagattttttttcttaaaggtttcagcaaaagctgaagggtcatggtgggtctcatgcctgagtctgctggctctctgggaatgacaacacttgggtgtatgagtgtgagagtgaagaaaaggcagaacaattgtgtagagctgggtaactcgttcatttttggggattcaggaaggagttgaactcccccatctgggatacacataggagaatagttacatccctggtggcttgctttcttatctgcaggattgttttctaatcctacagagtttggggttgttttccatcaggctgttcatgcatgaggcagcacagctcctgagctccatcctaccagatcactgccctgcccagttgccagtacaaatattaggtttccacatagaggaattttgtaggctgttcaaacctacaaaagaggctgtgagcagccacgtgacctgaaacacattcctcctccttgtaattgagcatactttgctggtctgcccaggacctcagtctccattggtagcatctggagcaccagtggctgaatgcaatgagtgttgcccaagtcttactgctgtcatgtgatggaagtgagaacatttgctagctcaggacactcatgattggaattgaatgagtaaaaagaaatcctcttccactcctatactgcactgtttttaccagtaaataaatgtgcccaagactgagtgtggttagaaaagacaagactttgttttccttcttgagttagccagatggaaatactcctgatagttagctttttgtcactgtgttagacacttttcttgtgtgacaaaattcctaatagaagcaaaaaggagaaaagagttgtccttcttcctcctccttctcccctgacccctcctcctccccctcctcctttttcaccttctcatcatttgttttttgaggcagagtttctctgtatagcccttgctgttctggaactcactctgtaaatcagattggcctagaattgagaaatccgcctgcttctgcctccccagtgctggaattaaaggtgtgcaccaccacacctggcttattatttatctttgactcacgtttaagcaatatagtgtgtcatggtaaggaaagcatggtgactggaactccacccatagtaggaggggctcaaggcgtggcttgttacaatcattagatcaagaaacagaaagagctctgacttgaacaagggctgggttcagtcctaagtgacctgcttcctccagctagacttctcctaaatgttccagagctccccgagacgtaccaccagaaagacaacaagcatttgaacacatgagtctaggagagggacctttcacatgcaaattctagcactcaccatggcaaaataagcctgcaaataaatttgaagaagactgatttgttagctcagtgtttcaggagttctaggttggcttcactgcgatgaggcagaaaactgtgacagttggaacatgtggcagagaaggctgatgaaggcaacgcagctaagaagtagagggaatcgggaaggggttggaacatgatacaactctaaagtcatgcctccgttgatagacattgtctaatctggctctacctcctatgatgttccaatcttaccatgaaattatggacctatcagtgggttaatccattaatggaatcatagccctcatgatcaagtcactcagcaaacctttaacacacgagccttcctttggcatttcaggctgaaggtgtaacacttcctctgtgccattgctcagccgttgcttcagagtcttaatgtttggttcaatgaaaacagggttagtttttaacaggaacatcacatactgttctgtctgggctaaaattctaggggggcacagctggatctctctatgggacccagaggggtccaatacttggtcatatttagaggagagacgagaactaaattgtggattccagaatgtgaggttatctcggttattcgagaactagaaataattttcaggactttcttgcagaatacaccgtgacttacaccacactgttttcttcctgtgttccatacctgggaagggggaaatttggatttctgaacgagaacagcttgggccacagagaaagtacagggaagagtgcatttgctcagtgctgaacttgcctgctgagaagaggttgaatatttttgttttgttttattaatttaccttttcatatatatgaaaaaaacttagaaaaaatgaaacgttcataaggatgcttaacaacagatctcatacacatgtcctccagccgacaggacccagtgctatctgtttgttgtattattccaaagttatcctatgcaaggccaaactaattcatgtggacagatggatacaaaaacatgcatccaaattccaggcacacatgtgcatgtatgcacacaggcatgcgtgtactttcacacccccaagcatcactacatctgtgtatgcatagacacaccacatgcgcgtacatcatgtgcacaaacccagagacaccgcatgtacacataccacacgcacacacaccacatgtgtgcatgcatacagatgtaccacatgcatacacatcccatgcacacccccccttcccatgcacacacaccacacgcatggacacaagacatatgcttcttttatcttcatacttttctttttaaaaatagaataatcttgcacttctttccatggctagaatagtaaacaacaaacattcctcatttatatttatgtcttcctattttctaatatctctctaagccctccagtagttgacagagctctcttttgatggacatttaaattgtttccaggctttgctgtacgatgctgtagtaagtaatcatacacatgtgtgaggctcccacagtggaacacatgagtcaggagcatctgtacttgacattctgacatatttccaaatctccctctatagcctatggaggttagatgcccatcagcagtgcatgctagtacagggccaggccactgttaggctgagcatgaaggaagagcgggagaaaggactgagggtaattgtgaacaggtttagcagggaagaagacgtgggacagattgtgattatgggaggtgctggagagctacacagagaaccctgagaagcggagtggatgtttggaaagcagggtgaatatacgaagtcagccgagattacaacacacagcagcaattacgaactcataaatgtcacctgtgcttcgtgattggtagcccaaggaggcagcagtgctgccaaaggctctgccccgtaggagagaaaaagacctgggactaaaggagatggccagccctggagttggagtgttcggtttcattttgggtctgaggactgagacaaacaaaacagcaggagattagggaagtggcccagcgacctggggtttatcacaaggttctgctgaggcagagggaggaaaacaggtgtgcacctaacctatgacccacatccctgatgcagacaagaacggaagtggagggaagagagcaacagctgtctggatcttaaaagtcctcagccgatgctgttatgattatttttctcacttttcttgctcagaccctaggaaacaaaacctggggaaactgtaccttggtttcagttttgaagcaaagggaagactaatgcagtaacatgtgggggtacgagggcttgtggtcactgttacccacaaaatcatgaaatggatcaagaacaaagctaggcataggcacggtactctgagaggtcaagggatacatcaaaaaggctgggaactctacatacagagaagagaactcagtcatcctgagctgctgggaagtaaggtagctctgactgcaccatttcccatgcagtatcaccaagaaggaagggcttagccctgagggaacctggatttcctaggggccagcacagaaggtggaaagggcatttactaaggacacaagagctcctgtatgaaccgtatgaggaaggacaaaccccatactaagggtggtgctgagaacaatagccttttaagtttttagttagtttttagtttttagttaaagagaaactggacttgaggtgtgccatgcctctcacaggtgcaaggaattgggacaacagtctccacactgcatactgcccgtgaggtttctgttgctattttgtttcttctgtcttcagtgctagggcgctaaccctggaccttgtgcatgctagaaaagtgctgttacagggagcaagcgtcagcactgtcacttgtacgtaaaattagagccaagtgtctgaggggtcagagaagctggaaaacagagaagggagtcaaggccactgaggggcatcagtggataaaggtgcttaccacaagcatggcgacctgcctttgaaccctggaacccagccacaaggtggaaggagagaaccactgtctgccagattagatacaagcatcttggcacactcctatatatacacagacacacagtaactaaaagaatttttttttttaatatttaaaaaagattgagtcacatctgagcctggggaaatagctccttctggagggcctgagtttgagtctcagaaattacaaacaagtcagggtgtggtggcacactgatgtaatccaagggagacagacaggaggctccctggagctcactgaccagtctgtattgtctaactagtgagctccagtgagaaacccggcctcagaaaatagtgggcagtgacagtcaaggttggcctttggcctcgacacatattctttctctctctcatacatgcaagtgagatctctctcctctccccgctgcccccctcaggtatttacacagattaaggtagaagtttcaccagacttagatcattggttcatctggaaacgtgtctgtcctgatagaccagaaacacacttcagtggatgctgcagaatcactgcctgggatatattttgacaaagaatataggctggatgttcaattgttttaacactctattagtatctgaatgggttagagttgggggtgcattatcatgcatagggatggtatgtgttatagagatcacctataagcaggtgttggcatgtttacatgtgtgggtgggtattggcaagagtagcatggatgtaggtaggagggagtgtgtgcgtgcgcatgcgtgcgtgcgtgcttgtgtgcttgtgtgtgtgtgtgtgtgtgtgtctgtctgtctgtctgtctactgctgctactgcttctgcttagatgatgggatctgccagactctgtacctcagctattgtcttagaagaagaatggccatccagtgtgccacaaagtagatgttaaacttcaagacaggtctgagaatggagtaggccttaggccaaaccatggcaggtatttttgttctgccaaagagggacctggctgtggactgggggctgccctcccctcctctccccagtcatgctcaccctctgcatccttgctttccttctcagctgctctcccaagatggtctgcatctgctggtgactgacgttgggtgcttttctctgctttctcttccttcccacagtcagttctgaatgtgatcagtgagctgcaggaacagatgtgtaggctgcagctggacatccacaggcagattcaagagcgcctgttacttgctagggaccaccctgaggagctggtggccggtgaccacgaggccaagccccagccctgcagccaggactgtgccccttgggaggggtcacctgtaggaatcacacttaagtatatcagcgcatgtgtgtgtgatgtctcagtggtagaaggctggggtttctcctaaccataactgtgtgcagtggcttcgcatggatttgctgttagttacctcagggcagagcttggtctcacacagacctctcttgatgtgaggtgggctctgggaccatcatcagtcagggtttgagcaggtgaaactagtcctcagaaggccacattccccatctttaggaataggatcaagatgtatcgcaggctctgagtggtgggggatttgggccaaagcaagattcaggattctttttcccagtctatgatccagacacttatccctccccctggactggatgtttaaatgaagtcccattgtatgattctctttaagggaaaaaaacccaacagcatcatgggaaaaaatcctttcaaatcaatttttagagaagcttagccacatccctcaccccagggagtaaacacatcagggttttcgtttgttatgaataattaagtcatcacctgaacttccaggaaaacaatatccacataataatcacaatagagtgagttcatgaccttttgggccatatgccaaagaagtcacaagaacccagacagcagtagcctgtactttcttaattctgtccccagctggcatggtgccctctctgagcaaactgagcagcaccccgccccccaagataggaacaaaacagacagactcttcctgcctgctgggcattggaacggctcaggcagggccaacaatattactaggaaaggattccgaatctctggtaaatctaaataggcaaccaaaagtctcggagcccagtgatgaagatcaagggcacagtcaccttagcttagaggaccctttttaaataagtatcaagaaatacttacctcagctgtaagtcatttttaataaattatcttataagattcatgtggaaggagtgtcacttcatggtagattatctcagaatgcaaagacatctaagccagttaaatgatgacttgagtatcaggtgtttgttcatcaacagctatgtgccaggatctgctgggtaagaggttcagaaaggctccccagacctcacagaagggaacagaactatccattaggtaaaccttacaggagatctgtaggaaacacctgaagagtcccagagagcgttttaatgtgatggggaggtctttgcttgggtaggctgaagggtaggcaggagttaacatggtgggcaggtagaaagagaatggggtaattataagctgggaagcagttgaaaattctccagtggacatattagagtttatccggggcaggccaggccaggccaggctggtcatgagttagctccgagaagcaagggagtgccatgatcagatgggtgtgctaatgccattggtcctctgggagtttagcactgaggttttccatagggcctagggcacaaaggatcaactatttgaagctactcaggttaccaacactcactgcattctgggtggtacttttggagggaaatgagacataacaacattcgtggatgtgacatgggtaaagcttggacccaaatagaattaacgacctttatggcagttcttcggataggaagcagttgttatctgaaccgaagtaaagtttggttcaagacaacagtgttggcaggtcacattggcagtgcatgttgtaatccccagggtctggaaggtagaagcaggtttgaaagcttgaggccgatttgtactgtgtagtgagtttacaggtcagcctagtctttgagattctgcctcagggaaaaaaaccaaaaaacaaacaaacaaaacaaacaaacaaacaaacaacagggctggagagatggctcagtggttaagagcactgactgttcttatgaaggttctgagttcaaatcccaacaaccacatggtggctcacaaccatctgtaatgacatctgacgccctctactggtgtgtctgaagacagatatagtgtacttacatataaataataaataaatcttaaaaaaaaaaagaagaagaacaaaccaacaaagataacattgctgagtgttgcccctttcttgagggagttttcaaccagagatcccagagttagaggatgcgagcttaaattcctgccctgcttaccacctgtacaaatgtgtatgcagaagtgatttacacatcccttcctcagtcaggcagcgtcactgacttcccatccacaatgccatagtgaacactcatctgtagatcttcccaccccggagctccccagtctcatctccagtgcatgtgacagctaatctctgttccacctcagtgggcagtctcactttctgcctctactggattcctctctgcatgccttcctgtttctctagtttaacctcctcgtcagaacaggacgctcatgctggcatctgcggttggcactcagcgtttgttctctgattcttacggcctgtgaagcctcggaggcttgccacttcctcctctggctccccaccttcctcacagagaaatagatgcttctctcgcttcctgctcctctctccactaccagggaagctgcctccacgtcagcatctctgcaccttccactcccaagcttgacctgtctacttgtgacacctgtatatgagctgggcacatctcatggaggttcagatgtcagaggaaggggatgccaggatatacgaataagaggataatattgagttttagcctgggaggtagcttgcttggtaaagtgatgagcatgaggacctgagttctatctccataacaaatgtttaaaacaaacaaacaaacaaaactaccaccatcactaccatcaacaataaaataactcccctcgccccctaaccccacagtcccacatgtagtcctagcagtgtggggtggaggcacgcagatgcctggggcttgctggccaaccagcaagagacctacctgttctagaggaaaaaacaaattaaaaaactaaataatatacctaaggttgtcctctggcctacatgtgcacatgcaaatgcacacatatgtacattgcagtttcttctctctcatgtctgaaactccctggccttcatttttaaacgggcacaacacagcctttcctggatcccagaccagtttaaagcacaaagctgcagacacggagcctgctggctccagacagctgtcgacagttgctgctggcccagccccctctgcatgagccttatccagtttggagccttcttgcttgctccttatctgtcacagctctgacattctctctcttctcttcaggagttactgcaagagcttaagcacctcaaaatcaaggtggaggagctggagaacgagcggaaccagtatgagtgggagctgaaggccaccaaggtaaccggcagtaggaggcacccgaggagggtgaggggtggggcccctgctgggaggggcttcgctctcaggcttccctacaacagaagtgtggaagtgcaaaccagccccacacagtggcacctaggctgtagtgcagttctgctgtaaaaaggttcctcatgaggagcctgggaaactgaagtgagagccgctgaggttccccggccctacctccttccccagcagcatccttctgtccctgacttagccaaggaggttcttgggagagtgggcgagtgggctggcaggtgagtgacagcagaactcgggagtgtgactgttgggattgctggagacacctgtgtaaactcagcagttcctgtcattattggttttctagaaataataataatcatgcatttctcaaacgataaagcttgctttatttattcaaccaaatcatttttactgtattggggagcttgttgtataaaggacaccgaaaagaaattctttagtgggatattgttttcttctttcttgtaagtttctcctcattgaactgcaggggttaaaagtagtgttaagttgggtaggtatcttggggcacttgtcatcccaacatacccacagcatattgaatcaggagggtcacttgcagttggaggctatcttagactacatagtgggttccaggccagcctgagctaaatagcatgcttctgtcccagaaaacaacagtacaccaaaacaaacaaacaaaaatagaaaaaaaaagatttaaatatttttgtctgtgtgttatgtcttaaaaatgttaaattagttgtcaggtgaacaataggaaacatagcactaaaactagttaagctatttttagagtgtgtgagggtgggatggatggagcaccgatgtttgggtagcatgtgctctggctacctgtggaggtcagggacttaggaagtgggtccccttgagttgtcaagttggggaggcaggagcttttgtctgttgagccatcttgtcagctcaggagtctgttgtttgaaaaatatataataaattccaaaatgaataaaagatcactgaatctcccaatacagagaagagactgttggagcagaagcaaagttctggtcactctgatctgctcactagcattgtgtggctgtcacattaccggactgtgccttctggggagtgacagatagtaggattcaataacaaagggcttcacttgggcattaggaggaagaaggaaactctaggtccagtttctcctggaggaagcctgggacactgccacttaagagaaaacacttctgcttttcccttaggtcctgtagagccattcacaggtgacacctggtgacgctttgcaggcatttcagtgttcagtgtgtgttcacatttttgttgttgttgtttgcttgtttgtttttactttatttttcacttactcactttatatcctgctcactgcccccttcctggtcggtcactcccgcccccaatcctttccccttccctcggttcttcccccaatcattcccccattccccttttgtaactctaattctaggggcctgacaagccttactggcttctgccatcactgccggcctgtggtgcataattacacatgtgggcacatcatgtatgtttatgtatgaactcataaaataattaaaattttttttaaacagaaaggaataaagatcactcagatcacccagctgctgccactgttactggttcctccctaccaggtgtttttgtttatgagccccacccccacccttctccctccctttctcttctctttcttgccccctctacatttcttccccagtttctggtgatgatttatacaaaagtatatattgtgcttttttccccatttgaaaattgatgatttaagttactaaaagagaagtgctgcacatgatgttagtatttatatagtcatatttccatgtataaacataacatgcttaaccatttttcagatgacaaaatggaggcctagagagagcaagtaactctcccacactctcaccaccaggcaggcctggcctgacatggacttttgttgtctgagcacagagccttgtgtgtgcttggctgtgttttcaccaatttaagagccttgttttttccagtagctcaaaactttccactacggcactcattcctgccagtccagccccggtgagacctttgaagttgcacacatcaccctttgttataaaaccaagaaactctttttaatccacccaagctctctgccttggcatgtggatccgtgagatgctaaggcgtctttaataattaccaggtgtgaaacacctcccaccagaacccacccagccctttgcacacttttcttttttaagtcagagagtagtgctatggttgtgtttgacactgattttgctgttaaagaacacaagacttcagtggccaaggcgaggtgtggacctgggtctcccctttctgtgctgtcctgttttttcctgaagtggcagcttcccaaactgaaatcctctctgtatttgtaagctgttcagttttcagtgtcagcctcctcagtccctcaaggtggctcatcctaataaacaacagtagggtttgtgccctgagcttagtaagacacagtcctgtaggggtgcagatgttttcctgccctgcagggacccagagcacttctctctgccacactgccagcttctgattgtcaaggatctcaagcagcagggttttttttttttttttttttatggttgagagagccattgttttcatggttctggatggggctatccatccatccatctagctgtgggacaggtagctttctacagatagcagagagcctgtagtttttcctggttctatggctgtttcagagtgaaggttgagtcaaatcacttggactttgggatctgtggcaaaggctcatactttggatacttggtccccagttgttgaaactgtttggaaggaattagatgttgcctttttagaagatatgtgtcatcgggtagtgggcggtattcctagctagtggtctatgcctcattcttactatataagctctcagctaccgcttcagtgccatacctgcccacccgtctgctataatgttctctgccatcatggtcatggactagactttgaaactacacccccccctcccaataaactataagttgccttggtcatggtgtcttatcacagcaatagaaaagtaattaagacaggatcgatagtacatcagtgacctcatatagaggccagcctcaaggagaagagacccctgagagccagatgctatactctgattcagtaggcccacttcactgaagtctacttgtgaggctagcagacaagagtaacattgaaagcagagaccacactaaagaaccacaggcgaggagccatgcaagaaaagttgagagatttagttctaaagaatatcctgaccctggtggaaatgagatgcatttgggttgagaatcctaaggctagagttgttaggagccattggcaccattatccataagccagtggacacacaggccccaaatgatgtgtggtccataatgggtgtccatctcagtaagctggatggagtagccagactttgctctcttgattctgggtacagcccagagcagaagaatgtgcttcatagtgagctttgcagagctttgaagcctgaccttgcatctcctgttttcctttatatctctgtcccatttggaggatgtgaggggaggcttattcagaaccatcgagaaggctgagaaataccaagtctcttaagagtggccttcattcctcctattaacctggtagcatgcgacctgggaagcctggagctctccactggaggagcaggctgggagcggggatggaattctgcacgagagcagactaggtgagcgggtaaagctctgtattggagcagcaggctggctgatgaagtcctgtgatgaagcagagagactgaggtatgtgacgccctacattggagcaggcaggctgggtgggtggcattctgcatcagagcacatgtcagaagttggcatctgttatgtttttaatgaacatcccccctccccttcccataggctcataaatttgaatgtctggctcctagttgtcaggcagactatctagattagggattagggggtgtggtcttgttggaggaggtgtgtcacccaggatgagctttacattttcaaaagcccacgccaggcccggtttctctcttgctctgcctgctgcctgtggatcaggaggtaaagctctcagtgactgctccagctccatgcctgtctgcttcctgccatgatgacaatggacaacttcttccttctggaactataagcaagcccccagttaaatgctttcttttataaagttgccttggtcactatgtctctttcttgtaataaatagaacagtaactaagacagtagtttttgaaaatagtgagaatactggctgcagggtgtgataacactgagcaaaacctggcaggcagaagagtcaccaataggactggtactcacttgattccttgctgcagttcaacgattgacttgggccccacattatactctgacagccagagttagactatgactaggttcctacatggcgagcagtaggcagggttgatgcctttgctgtgagtttcactgctcagagcgtagttctaaatcttttcttggtttgacgttcagaatggagctttttcctaaggtaaggaagagggtgggatgaactgttactgtgattgcagtatttactgggcctcacatatatgatatgtgagtcactcatagtggttatattatatagtcttcccacaggccatgaagtagaagctaataagccaagactcagaaggctcaattacttgtccaaggtcatgcaactggaacatgacagattctagatttgtttggccacaaaaggcttcttggagtgagatactaggagctctgattttctaatgaatctggaaagcatggataaccatgtgtagtgctgtgatgaaatttaacctgttatgcatagtggagatgtgggaactacccagtgttaatgccaatgtgtgtgtgtgtgtgtgtgtgtgcacgcacacatggatgaatgtgtgtgcagtgtgcttacgttctttcctttaagaaaagtatatgtatttaacacactctaaagcttgaatgtatgctcataggcaagcatacagctgtgcctggaggttgggcaaaagcattaactgcacaaaaggagaatatctaaggtgtatgtgtatcttgggagaggaaaggagaatatctaaggtgtatgtgtatcttgggagaggaaagaccacgtgcaaaatcaacagttcaacttgtgcagcagggacagagccttcccactgtacacagtcctagctgctctggcctcagttttacccaggctttacagacagggaagagaaagagcttggtcaaataaggggatgcagaagcaagctgacggcaggcgagtgagttccttctgcaggattccgtcttttggggagggcagttatccactcttactcctcgcccgtgtccttcactcctgctgtctcttgggatccagtgggctctggattaaaattatgccatttgtgatgagctggaagtctctttgatccagaagggattctctgttgcttcttcaggctgaggtagcccagctgcaagaacaggtggccctaaaagatgcagaaattgagcgtctccacagccagctctcccggagtgcagctctccacagcgaccatgcagagcgaggtaactagattgactgacagcacattatcttaggtcctgggcccactcttatgtctgtgaatgagtatgtccttgcatgtctgggtatgagtaatgtacacacacacatgtgtgtgtgagcatgtacttatgtatacagtgtgcttgcttgtaaagctgaattctattgtgggacctttatcacacccctcccttacctagaacactcagctctgaaggcttttctcacaacattgtttgaagctctgtgcagccccttctggaggtttgtttgtttttttcccctaaaaacaacctgacttcattgggttgaaaggccttgcctctgtgttaccaccagaggggtattagctgtttatcctgcctgacatttgtagaaggccctgaggttacagaagcaaaccaattccttgtcatccttagatctctacttaaatggcatttctcaggaagctcttcttgacctcaagtagttgactctggttgttattcttgaactcagcagcctcttgttcccagcatagcgtatactgttacttagtagtgctggattttgggaggtcttgagatcaccctactctaactcaatgattttatctttgtttaaaagcacctcagaacctagcacaatatttggctcaccataaaactgagtcattaaataagtgaagtgatactggatgctccctggagagtgcaagtcttgtcaattaaaaccagaagaaaccctcaagttcttaacatgcatagtatgttgtgcaattttccaatgatatggaaagatcacacatgcccaagctcctctacttgccaccggataccaagcaatggggtgctgcccgtgtgtagccttatcctggcctcaacactccccatcttggttctctagctggtgtgagagcattcccaagttatcaggcgtgacagcagctgcctgtacgcatggcaccatcttgctgtcccttcccaccttttcttttcttttggttttggattgagctcaaggccttgtccatagaagacatattactctgccacaaaactgtatctctagcctttacatttttttttcttttattttgagatactaaattgcccaggcagggcttgcagcttgtatctcgtacttcagcctactatgattataggcttatagctccatgctcatatataaacatttatttaattagattatacagtttgaaattaaaccaactaccaaacctttgtatgatgcccagtctccatttattatccataagttgttttgggttttctttttgttatttgttttgttttgttttatttatttatttatttatttatttattttgttttttgtttttttagacagggttttttgtttttcgagacagggtttctctgtgaatccctggctgtcctgaactcattctacagaaccaggctggcctcgaactcagaaaaatccacctgtctctgcctcccaagtgctgggattaaaggcatgaaccaccactcccggctgtttcagtctttctttcctaaatttttcctctgcttctagtttttctgactgaatggtcttccctcaaactaatcaggagcctaggcatctgattatgatacatatgatattcatgcatagaatatgaatatttatgttcttaggaaatgctgtttatgaaagactttcttttcctctctgtcagctttgagtaaatgatatttttattttgcccctagatacaaaaaaaaaaaaaaaagacaaaacactaggttattcataatgtacccaacaaatgtctaatgagacccacggtgccagataccatcctgggctctttggacaaataaaacggagccatattcacatattcacatgtcaaaggccattagcatatgtgaatatctatcagaatttgtcaagtaattccttctatacctcaattcttctagatcaagaaatccaccgtctgaaaatggggatggaaacactgctggttgccaatgaggataaggtgagacagttgccatggcaccttgtccttcttcaaaggcacctctaactctttggtcccttctggtctctgctctactggacagtgctatgctgtcgctgacaagatatgttaagacattttcagcttttggcactagagactcaacttcagtacttgtttatgatgcctgagaatttcacataaactgaatctctcaaatgtgacttagagctctgtctgttcatggtggtgtgctgaaaaccccctatgctcgctcatgtcacaactcttagcaagctcagcaacagctcctatgtgtgcagtttgcctctcatggtagaactatcatagggacacttttagcagcctgcagtccctcagtttaccctgctaccatatcatatctcattcctatataatcataaaatagctacgtacatacacagaaaaatacctagctagtttaaacagggtttgtgagaatcatagccccacattttcagcagaagaaaaagactcaaaaatgcttggataactttgcatagggtcaggtgaccagctacaatttcaaacccctgtgtttcaggatctatgtcacctaaggccccagactgtaactttgaaagaatgaatccttcctaggacatcctctgttacataaagtacttcagattccgaggggatggctggagagattgggaaatgtctatgtgtgtagctccggagagtgacacagcaatgagaggcactgcatcaagactgttgagaggtgaggcagagaggtagagttctgccagcacgtaggcctcttcatgagtatcagtgagtgttgacccacaccttcagatagggccataagggtcataggctgcctgtgaggcagaccaccgggacccagtgaactctgactttttctctttgggtctttagctgttttatatgggattttcttcactgtggtccagataaagttgactagagaccagaggtggtgttaatcttgttctgctcttataccatggcaggaccgtcggatagaggagctgacagggctgttgaacaagtacctaagggtaaaggagattgtgatggcaactcagggtaagagaaggagaaacccccatttcccctgaaagatattttctctactatgtcagaagcaggaaaattctgctgtcagggtctttgccccctggttggagatgcattagagaatggatccatatatagactcttggaaggtgcagatgatgatttctggaaatttcatcaatatggtagttagatcagaacttctagggaccacccgtttgtttttagctcttgggaatccttctcattagagggtctccagtctgtcttcttaggattccccatttgaggcaatgagaggactcagactgggtcagtcagagccctcatgggtctcagagcttgtcagtgtctcacaggatatgtagttcctcgcagatgcagcagacatggagggggcttccgtgagtcgccaggtagccaggttgccatagaaagtcaatgttcatgtttaccgcccagacccgtgcaatgtacaagcaccttatgttcatatgagcacagtggtgctctggtggctcatgcaccggacctggcactcattgttgatctgtaagagcagttagtttttcacaggagagttgtgtgaaggatacctgcttctagctgagctactgactctgtttagaaacaaaccttgtctctgcggggataggactgactggtttctgcccaaggtacctgtcaggcccgatgcaagtgttgcagcctcttttttctaattctttgtgatgttgggccaaatccctcatgggacctgattgcctttggccaataaataagaacttggaagcaagaaatggcttactcctctgttttagggataaactgtgaccttaaagtgacccttgtagcaacccttgattggatgccctgaagaatttttccattcccactattaatatctctttatgtagtaattactttccttgttgctttcatcagatacatgacaggaagcaacataagggagaaaaaaaccttactctggctcacagtttgaagcatgtgcaccacggcagcaggaatgtgtggcagggactccttgctttctgattggccaggaggtggaaagactgatcagaaatgggcccaacagtaacctatggatcatctcttagcccagtaacccacctcctccaatgaggctcacaggttcccaaaatggcaatactagctgagaaccgaacacataagcctaggacaaacatcctatactcaaaccgtaacaatgtaaatatgtcttagtctttcttgtttttgagacagggtggagtcaagccccccaagctgaagcaatccttctcggtatttattaataaagaacaaacaccattagggttccatggtatgagattttgagcaagtctcaacagtatttgagcaggtctcacagtagtgatataatgatcttaccaatgctttaatatttccagggccttcagaaagaaccctctccatcaatgaagatgaaatagagggaagcttccgaaaatggaataccacaaataaaagcccagaggaagtcccgaagcaagaggtactgcgcttcccacaatgtagggttcatttgccattggagagcttgccttgatgtagagaggcatccatccagtagacacctatccattatacatcttaactgatgaatagttcagtccaggggcagaggcaggcggatttctgagttcgaggccagtctggtttacaaagtgagctccaggacagccagggctatacagagaaatcctgtctcaaaacaaaacaaaacaaaaaaccaaaaaaaaaaaaaaaaaaaaagaaaaagaaaaaatgttcagggagcaagtacctaggctcaggcctgagctctggctaggactgcgtggtggccactgaaactctgaagggcagggattttcctctttaattggccttctgtttatctttcctctctggcatgaagcacagaacaagaatggtgtttattttatttaccaaggcttctccagggtctgcagacttatacccagtggactcgtacatatttgataaatgagtgagttcatcttgactatgtagagacacagacatcttccatagcagtgcattcctgcctcacgaatgcgcctctgtcagcccctctaaccagcacatggattttcttctctttgctctaaaatctgactccactgtatcattctctggaatgtggttaaacacagatgaataaacatgttcatagacagaggtcttgagggggctggggctgcagcagggccaaaagattcatgagatctagaaagatcatattaaaactgattaattattttgaggaacttaatctttattattattattattattttatttatttacatgtcaaatattgtcccccttcccactctcccctctgcaaatcccccatctcatcctcctttccctttgtctctaagagggtgctcctcccccacctcacccctctagcatccccttttgtttgggcaacaagcctccacaggaccaagcatcctggatgccagatgaggcagttctctgctacataggtagtgggagctatgaatccacccatgtgtactccttggttggtggtttaggccctggaagctctgaggggtctggttagttgatgcttcctatgtggttgcagtcccctgcagctccttccgtgaaggacttaatctttaacaaaggagcagatggcatccagtaacatactcctcatcccccattactgactcaaggaaagtccattagattgctggtagttatatctgagcagtagtcaggacagtttgtctaagtcactctgcaggtagatggcagatagataacagaacaggacttgaacccaggtctgttggaccagcaagctcaggttcttaatacctgtgctctgaggttagagattttcctagagcaaaccagaaaggcctagggcttgagggaaaagactccactcactctatggtgagtggagcagtaaagacaactctgtcctgtcttccccactgtctcagacaggcaggtggcatagctcctctatccatgcttattaacccgcctcctagtgtgggtatgcttaattcctaataaagggtttgcaggtaatagatggtatgggtgcttgctgagtgactatatctctagggtcctctcagtgagtcacagaatttgactctgactcatttatgccaaaaggaagtattttgcatagtgtgggctagtgaccctctgaatgagagaagatgagacaagctatgaaaaggacagaggtcatggcattctcccagccttgggagtctggtgctggcacctggacttatgtctaaggtctagggctcagggacaaaaggcagtttgatcctggaggcttatatgtgcattgtctctcagaacttgatggattatttaatgaacatttcttgaaagaacaaagcgttcatatgagtacacacaccctggctatagccaggggcagaaatgttcttagaggagtcatcaaggggaaaggcatcaagggaaagccctcatggctgctcttctgtttgtgaaacagatatcaccacgatgcagctctcccaccccaggaccacctcctttgccacagaaatcactggagagcaggtaggagaattgaactctttctggggcacacaaggcagatggcaactgggcaggtgtggtgtgtatagccacagggctctgggtacagtgttaagccaacttcttctgtgtactgaggaatttcctctcccataggctgagagtcactgacattgaggaaagatctacccagggaacttgttggctataatccttcatttcctctgtggccactggtagcattgtcccctttctgtgcatttgatgccctcagaagaataaccactgtgaagacacaggtcccctgagctgactgcccaggataggtagagccagaatgaagggttggaggaccctaggccatgcttgaagctatggctgggtgctcttgcctcttcccaaagaagggccttgcagttccctacccagattacttttggctttaaaggttaggtggcctaagcacttttcctccaccatgactctgtggacactgggtttccgcagggagacccagtggtcatatcttataagtaccagtgttgggccaggcttgccccaaggtcttaccttatacgtgggttacctcctataaggtgatttctctctgacctttactccaagctgaagttaggctgttggttaagcatctaacatgccatgttcatgaatggcaccaaggaaccctttccatggtcactaagattcctttctgtgtttatccagggctcagaagaaactctcctgcagtctagaagacttgagacgtgaatctggggataaggtcagctcatcaatcagccgtgctaattactgagttgctcctttaggcccagcacagtgctgggatgagctggtgggcgcatgcaggtttgaggaaatcgtaggaacaggaacagcaaggtcagagccatatgccacacaagccaagaaggtcatagactgtggcctcatctccttagtgtacctgggatccctgaagggactctgaatgaggtagtaatgtaggtaaaggggatgatgtcaggagtccagcctggaacaatctagaagattagagaggcagcttaaaacaaaagtctggaaagatctgaggggggctttgtggccctgtgtgtgaggctgggcttgaccatgtgactggacccagggcagggttggaggggacaatgaaaggctttgagtttagcaatgactaagcacagggttgccctgatggagcctctggtgagccatgcttcatatgtcccctgacttcagacagagtgacatggtagagatccacaaaagttgggagttgacaggatgcgatgcccagacacatgccttttgcgccattggtcagagtattggaaactgcccaagatattgttcatggctagacagtggcctctttcttattgtgggtggtgatcatctgacatgaaggagtgagcgaggcagaattcttacatctcagtgagtcagatgtaggcaggaaggtggttctgagctgctgattgtgactaacacagctcttcttttttccccatgtttgaatccttcttgtcactccgtagtgtgtcgatgggaaccagctgtccccagtgggagagcccaaggtacattcatttatgtccgtatcacttgcccttggttgtgatgcttactagagaattttagcagggtatagcttttgtaactttaaaatatgctaactgtaagagttaagaaatgaggagaggggaaatgtcatttttgtgtggtccataggcacgatgcactttctctgccattatccatggtgtaccgtttatcattatcactctgctccgtaggctcagaaaaactaatagctaatgaagaaggctaggtttagttacagggtaggaggtgtggtaatttctactcagcaacactcttcttctgtgctgagatgccaccgttaaacaattaaaaacacaggtgtgcacttagtctatctccagggaacaaatcatgttataaaaactccattagaactcgttttcttgtggaatcctgcaatggcagctgattacagtcctaggctggtaatccaatgttgagctcatggtaaactgaagatttgtataattagtgtcagccccacccagccaccattgcaagccgaatgtactgtgcatggcccctctgcctcctctgccttccaaaggagacacggacttcaccacatgtggcctgagaagactgtttgtattctcataccattatggcagagtgggggcatttctgttcttctaactctgtggaagaaagatcccatgagtattctcatatcaggaaaaggcttctctttgcttttgtgtttatggtagtctgctgtggctagccagacattcctcaggccatggggatctctatctatcttctcttctatctgttgtgttctgtggccccctgggaaagccctggggcccagccatcactcttgcagcctcagcgtctgagaagccattcacacttatctctaagtaacatgtaagtggctgcctacttctgtgggcatgccctggtccttccatgcttaggacaccatgttgcttaccgtggaaggtgagtgatgcaggtctgctcattctgggttgaaatgagttctcccacacctttgatcataattacaatctacgaaacttggtttagtgcaccatgaccacctcttccctccacacaccccgcctcatgccagcatattccacaggtacagtagtttttccacagcatctccttcctgtggtgcctaggcttaaactaaagctttttatggctcgagtgtcccttgtgtcagtcacccttgtgttctgactgctcatcattgtcccctgagttcctcagactgtgtactcctgacttgctctcctgtagaatgagtcagtctctcccattcccagcactcgaggatcaagtccctccagctctctgtgagtgctttcttctcagagctgtacactgtctttccctgtaagtgggtcagcagccttctcactactcatttcttggtggattctttctattgttctggaatagatgggcgtgttattctagattcatcctgtgatgtgatgttctgtatctagggtctgttcttcttgattgctgtcccccttgtgcctggtttgttatgtttcctatgcttctgtttgtctgctgaaagctatttgctgggctctgtgcatatcattttttcagctagcccagcggagggagtgttattcacctgttagaaatgaccagacagagggtttgagaggttacacagaaatggctttccctgagtcattctggcccaaaccttagcctcaacaaaaaactcataatgagagtttttctctactctgtatttcttatggaaaatggtacttggtgttccactctttggttctctaaacttaaaacccaactattttattgtgtttatgtgagcacatgtgtcagaggtctattaaagagctcatttttcatcttattcctcacttaagtgggacctctgttgttgcttctgcagctgcactcctcactgcaggctggctgaccttactgtaggctgactgatctcattgcaggctagttaacttctcatgggctaggggacctcaccatagactagccaaccttattataggctagataacctcactgcaggctagctgacctcactgcaggttagttgacctcactgtgggctagctgatgttaccatggtctagctgacctcacttcaggctagctgtacttactgtgggctagctgatgtcactgtgggctagatgactttcaagtttctgggtgatttttctgtctcttcctcatctcatcataggattgctgggattatagatttgtaccatcacatctggcttagtgtcacactcactccagtggagtccgagtgacaagtccaaaaacttggccacagtcctaaggcaaaaagtttcacagaaactggtctcctggaggttctttggccccctgtaacatggatgtggtccagatttgtccttgtgatagttggtggggggggggttgtgtgctttctttcagtattttactgtataagagttagaaatctcagggcaagttcaacaaaataaacttagaattctcattacagtcatgtatgacagattacattacataatagaagaaagttggtgggttcctctgataaatggaggttccccacagatacttagaataacagccgagcactcccatatacaggaatttacaatggtctaggaagaaggtgggctgtggtttaaggaggaactagagtaatgcattattcatgaaaagttagcaagagcgaacccccctggttcaagttttcacaaggctcagaagaatagcataattaggtgcttactaagggacccctggtggtgggttatacaatagactagaattgtgattagggtgcaaaatcctcgaacctggctcctagaatagctgactttagatagggccgcctttatctcagttgtaaccactgcctggttcctgtcagtctttatgtatgcatttctctgttttgtgtaaagagtcattatgcatcagatgacctcattgtatcttggctgatatatcacctaacttccttgttttcttctgtctgatgcttgctttgaaagattatattcagatccagtactctcttgtgttctcatgtatgtttgtcactccttgcccacctgagtaccagaactctgattctcccctgggttgagggactccgcctgagttcagccccatggcagctttttagtgggttcaaggaattgaacttgggtcattaggcttgggtagctagtgcctttatctgcagagtgatctctctagcccacaaatctattaactgttttgactactcttttcccatggtctgagtctgactgagtattagaataatccaagacgcttgttaaaaatacatgaagtgagttcattttcagaggggctgattcacagggcccgggaggagcccatgagatggtgttttcatagtgccctgggtgagtgtgaagcaactgccagtggatgagctagcactgggaagctgctgggctggttcacatgcctgatcatgtctgacctctctgctctgtgggtcatcacaagcttgaagatgtcatgatcttcatctctggatattctggcatgtctactatgtatcagatttctttaacactctcatttctcttctgattttcatttctaagttcatatgtggaggctcttgtcaatgtgtagtgagtgaatgagctgaatgtcaaacagctcctagaacatggaagcaaacggaattcagaaatgtactgcacacttgactgtcagtgaatgacgcttcaaaaggtgtcttggtcttggcaatcatccagcctcattctgactttccagttttaaattggttctgcctctcatattactcttttggttccaatcaagtgatccatggttgagtctcttggtgatgtcttattttctttttatgctcacacttgaaatgtgttctatatatttttctcaggtttgtggtgttagtgatctttatatacttcttagcaaaattcttgttagtctttctccttaaaaacagatggctttattgggattttttttttcggctaggatctagccatggtgcttgttgcatctaagtgatacctcaaagaggatagttcctatagactctaatatagacactctaagttcctatacactctaatatcactgtgtagcatggctgtgctcatggctaaacccttgcagagatctgccttggtctggtctgagtaagggtcttacttagcaaaaagcctcttttgtgaccacaggaaagcacatatggggaggtcagagaaacttggaccatactcctcttgctttcctctcccttggaatcaaccaaaatgctagccaggaaactgtggcttgtgtttttgaagagcctggggagaatttacgaccgtgaactcactgaacctctaactaacatggaacaaagggcatagggctccttttttgggaatagttatagtcatctctggatttgggcttgatgccgtctctgtgtcactgtgtagataattctttacctttctcctagaccaggagaaaggatcattgagtcaacctcagtgaaaagtgcctcttgaagaaagggtttatgcacacgaggatttcctaagttgttcaagctaaagtctgagggctaatttggcatttctccctctcttactttccaataggacagctctttcctagcggagcagaaataccccacattacctgggaagctttcaggagccacacccaatggagaagctgccaaatctcctcccactgcctccctccagcctgactcttcagggagcagccagccaaagctgagtgagtgtcgagcccctgggttggtggcctcaggaacagtgtccttaacattcacagtcactgtagctctaactgcagcccacaattaagaatagtgggaattgtttcttggcaagttgtgtcccagagtggccctgcatttaaagattccctgtctggataatctgcttcccaagttactgtacctccattctcccctttctccagtcctcctccagcccctgcctgtcctctccacctccctgcccccaccccagacagctacatttactcttcatgccctacctcctcctctgacaccctggtcttctctcttctgcatctgcctttgatgtagcccctgttaccactaagctgacagtatacacactccaaagttgagagtattttcctaggcaaatgtggtcaacagcagacaatttgatgtggtccaggagttcctgctttggtgaaccagccctaattcctctacctggctgttcgctgggtcatgctttattcttgaaactcaacgctgccctagacttttatagctctagataaacccttaattaactgtgttcagttatactcagactgctttgggtcattgaagtatgagtcctggtacctgcacagggactgcctatgatttagagtgctccccactcccattgctgatcctccttctctgcccgtggatacctcagcttgtgagaaagtggcaccaggatcctttggcctgatgcctcctctcaccatgctgaccctgtgggccaagcttggtcaccccttaacttgtcctccgtgggatggttttcctttctgtttgagtttttctcatttgctagatgatactcttcttatttctttgcttccccgttactgttgggctggactttggcctctcttgcttcttcatgtggcttctctgcttctgggttgctgaagatcgcggctggagtgtcagtgctcccgtattaggtactgtgactgttcaggtgaggtagaatgtgagaatacctttggtttccatttctcatgccctgcccacattccagaatctccctctgactaaatagcaagctctttattggaatagtctacaattacttgaaccccaaagtcttagaatttgaagacattaaatcctccaaattctaaactctggcctcactcgtttttagtgagagtccttggaagtgttctcaaactcttttggctccaggcatcttggtatggagctcaatgataaaggcagcattgggaagaatgctctggactcccgtagaaggatagctctggtgtaggggtggggttccgaaggttccccctcccattcattcacataccttttcattctgtccaccttaggagacacagaaggaggctgggaagatatagtctcatctgcttcgtctgggactgagtcaagccctcagtctcccgtgacaccagatggcaaacggagccccaaaggcattaagaagttctggggaaagtaagttggtgggaatggttgtaactctgtgtttagaccagggggatgctgtatgagtccctgctttaccccacatttgcatagctgtggaagtggaagagtcacattcacagagaagactgtgagttattatttttcgggactcagaagaagtgtgacaggcactcatcaaatactgtgtgcctttcatcctaggcatccctctgccccatgtccatgctcccatgaagaggcacagatgagagtgtgttcttttttctgcgtctcataaaatattttaaagagcaaaagccaagtacttgctagtccacctgattaattctgaacagaggcagaagctggagtctcctcaaaggcctcagccttcactttgatcctgtgaggagcggctccgatcccagggttaggcttagcattgaatctcgagtctgttggaagcactgtcgtaggtcatcttccctggcttcaggatagggactgggaagggtagtgcccagagccctgagcctgccatatctagcccctcacagtctctgtggattcctctccatgcaggatccgaagaactcagtctggaaacttcaatactgatgcaccggggatggcagagtttcgacgaggtgggctccgagcaactgcgggaccaaggctttctaggaccagggacaccaagggacagaaatggtaaggacctattcaggccatctgagaagagcttttcgaaatcctggccatggtgcagtgtgagctggggctggatgccccacagcctcagaggctaaaggcaggagtctatcatacatacttgtctgcttgccatgagtagatttacccgcactcatgggtgaggtaaaaaagcataagactccctgcagccaggcatggttggcataggaaggctatattagttacttttctagtttttgcaaacaaacagcaaaacaccaaacctgacaaaagcaacttgagaaaaaaaaaaagagagattattctcgctgtcagcccatcacaatggggaaggcatgatggcagcgtaaggtggctatgcacatcttcattcaggaagcagaaagagatgcgataaatgctggtgcttagctccctccctcctttttatccagtcagggtccccagctgatgggacgatgctgcctaaagttagggtacagtccctcatatttgcgctgtagcaaatagccctgaaaggtgcactgaaggggattgctaaggcgtgagtggcatggacatcagagcactgagtttcacctgactgtcccatcatgctttaataaaaatagacaaaacagcaagtccatttggaggtgtccctaatggatgccctcccgtgtctctcccccccccccccgctcttttccctgttctgagaaactgtctcccataaacctgctcttgtggatccttgctcgtgtgtggtgagacccctttccatatcagcggcccctgtggcatgccacctccagcccagactctggaagcccgatgtgcagagccagctttggttggaatgtgctacttaaaacgttaaccaaagagaaacgcttttgcgtgtttgcccttatactcacaatgcaaatactagttctcagacgagacacagttttccacccgagagcatttcctgaactgtgctctgtcacagacttgctgtgcacttttctctcccatgccctgaggaagggatctttaacttactgccacccccagattttaagactttgtcagatcctcctagtttgagacaggatcttcccatacttaacctctgcaccgttggagctcctcatgcctgtattatattataatccatgatgaaaggaggtgggtggggttgatccttctaatcctggaagtatatcctcagtaaataccagctttggggtggtgggtagggaatctaagggcacaactaaaaaggtgtccatcaatttggagtgaaagaaatacctgtatatcccataattagataccgtcatttacccagcagttttctaattttagacattttgtttctgggttctcagagatgagactgtgaaggtactgtaaactccagtgatcgatcggcctttggtccagttctggctctgtctttagggctcgagtgtagaggagaaaagaacattttgaagaccagcacacttgttcgtagtcagttcactgagctcctgccactgcagggccgggggcagtaatggcaggtactccctctgcctaaggaaggcgctgctgcagcaccagagcccgtttgctagaatgtctttgtgctttcttgaccatgacaatggttgatgaataatgagagggtcctcatgagcttgctgtgtttatctttaatgcctgtgctaacacacatcaagtttccccagggctggggggacaaacagaaaagagtggtgttacccttaaggagactataatgacatgccaatggcctctggcctgtaattcatagatatttaatacataaccttttataaaaacttgccactaatatttttgtggggaaagtgcctggttcctgagagctaccatccccaattctttttccagtgaaaattatatattttgcatttttaatatgtttcatgatgaattcagatcatgaagaaacttattgtttcattcccccaggtaaagtcttactgctttacatccggagcacactgtacagagagtctgctgccaccacagccttatcaaaattgtgtatttaggtttcttctctgtttcattttctctactctcaatgacttctccaagtttacagttttggcctgtttaagtttcacatttataggtttagttggtgaattttctgtatgtgggccagttttaatttatacctctgttacagatttctatctagtctctgcatattaaggttaatccatgtctggtaattatgttaagacagtttggggctcataccagaattttatgtttttagtgacactttgacaagtgaagtttttccatttgtagataatgaggctcattgacttcattgtttctttatgtgggaacaggatttaggtagatgtagaggggctggctttggtactgtaggagcaagaagggtgggtgggcagagatggacaaagatgtgagtgggaagatcgtaaagataaagatacagctgtgtctggattgtcttgaaccgtccataggacaggaatgttcagatcatgacctcagaagcatgcatttccctccttcagaacagagctgtcctcctgatatttcctcattctataaataaatgtaaaatgaaaatatattacttttatgtaaaaggtagaatgaaatgaaaacctgtgcacatgtgaaacaaaactgataaagtgaacattgacattgagaaattttcacactaaaaaacaaagtgtaggctgagagtgtgcctaagctagtaaaatgccggccatgcacgcatgggaccttgagttgagatccaaatagcctggtaaaagccaagtgtggtgcatacatctgcttgtaacaccagtgctggagcgaggggacagaggcatctggtttcttggtatttggtggccagtcttcttatttagtgagctcagtattcagtgaaaggtcctgactcaatataaggtggagcaagatgagacatacctggtattgacttttgggtttcaaatacatagtgcatacacatgtatgtgcccacatgtgagtgtaacacacacacacacacacacacacacacacacacacacacacacacatgcacacatacacacgcaaaagaaacaaaaagctaggtatggtggttcatatttataatgccagcatttgaaaggtatattgcaaataattcaaggccagcatgaaccacaggattaggccttatctcaaaactaataggccaaaatgccatatcacatcaaaatcagtaaaagcaggagttaaacttcatttagaagtggtaaagaaaaagttgatactcctataaagtgagtcagatgaactcactatgaaaaggttgtcatttcttgcttattttatatattgttctcacatcaacaaagacaacatgagtctgatgcccctgctggaaggatacagacaacacaccatttaagaggtcgattagcctctcaagagacagctatatcaggctcctgccagcatgctcttgtggcgttcacaatagtgcctggttatggtggttgtttatgggatggatccccaggtggaacagttgctggatggtcattccttccatctctgctccacactttgtctctgtaactccttccatgggtgttttgttcccccttctaagaaggaccgaagtatccatactttggtcttccttgagtttcatgtgttttgggaactgtatgttgggtattccgagcttctgggctaatagccacttatcagtgagtgcatatcatgtgtgttcttttatgactgggttacctcactcagggtgatatcctccagatgcatccatgtgtctaagaatttcataaattcattgtttttaattgctgagtagtactccattgtgtaaatgtaccacgtttcctgtatccattcctctattgagggacatctgggttctttatagcttctggctattataaataaggctgctatgaacgtagtggagcttgcatccttattacatgttggagcatcttctgggtatatgcccaggagtggtattgctggattctctggtaatactatgtccaattttctgaggaaccgccaaactgatttccagagtggttgtaccagcttgcaatcccaccagaaatggaggagtgttcctctatctcgacatcctctccagcatctgttgtcacctgaatttttttttttttgatttttcgagacagggtttctctgtgtagctctggctgtcctggaactcactctgtagatcaggctggcctcgaactcagaaatccacctgcctctgcctcccgagtgctgggattaaaggcgtgcgccaccacgcccggcgtgaatttttgatcttagccattctgactggtgtgaggtggaatttcagggttgttttgatttgcatttccctgatgattaaggatgttgaacattttttttcaggtgcttctcagccattcggtattccccagttgagaattctttgtttagctctgtaccttatttttttaataaggttatttggttttctggagtccaacttcttgagttctttgtatgtattggatattagccctctattggatttaggattagtaaatatcttttccccatctgttggttgcctttttgtctttttgacagcgtcctttgttttacagaagctttgcaattttatgaggtcccatttgttaattcttgatcttacagtataagccattggtgatgtgttcaggaatttttcccctgtgctcatatgttcgaggctcttccccactttctcctctataattttcagagtctatggttttaggtggaggtccttgatccacttagacttgaactttgtacaaggagataggaatggatcaattcaccttcttctacatggtaactgccagttgagccagcaccatttgttgaaactgctgtctttttttccactggatggttttagctcctttgtcaaagatcaagtgaccataggtgtgtgggttcatttctgggctttcaattctatttcattgatctacctgtctgtcactctaccagtaccatgcagtttttaatcacaattgctctgtagaacagcttgaggctctgccagtgcctgacaaatacagaagtggatgttcacagccatctatcggacggagcacagggtccccaatgaaggagctagagaaagtacccaaggagctataggggtttgcagccccataggaggaacaacaatatgaactaaccagtatttctagagctccctgggactaaaccaccaaccaaagaaaacacatggtgggactcatgactctagctgcatatgtagcagaggatgacctagtcagtcatcagtgggaggaaaggcacttagtcctgtgaaggttctatgccccagtataggggaatgccagggccaggaagcaggagtgggtgagttggtgagcagggggatggaggaaagggatagggggattttttcaggggaaactagggaaaggggataatatttgaaatgtaaataaaatatctaataaaaaataaaataagaaaagaaaaaaaaaaaaagaggtggattggccaccacactggagaacctgagctgtagtgtcgtcactcatgttacttaatagaaattttctgaaatggcaccaatgattctgagatcacatatgacagtgccagtggtaaattttggagttgatgctgttttattagtcttataataaaaaatgaggcctggcaatgtagctccgctgtagagtacttgctcagcatgcataaagccctgaggtccatccccagcactgacaaagtgactgtggtggtacacatctgtaagcccagcatgcccgagttggaagaggcagaaggttcagaaggtcaaggtcacccttagctacctgttgagtctgaagctgctctaggccctgtctcaaaaataaactaaaaatacgtaagtattatcattcactctagaaactagacttagtaaagttctgttctcatagaaagtattacagagctatggtcagagcacagacctaaaatgtgagggcaaaaactgctacagagctatatctaggagctgagattaaaaacaaaacaaaacaaaagaaaaactttgaattttgtgcaggggtttcatgttaaattggtaatttttacaatattttatcattccaaatattttccaattctatattgaaattatatattttctatacagaggatgcaccaactagtataaattctagacttaacacccaaatctgcaccttttagagccctgctgaaacccatgctctaggcgaggagtattcagtaactctcccagtattttgctggcttctttctgaatcagatttccctgtttagccaggcagtcagtaagttcttaaaaaatcatttctgcatgttaagagttcagctgtttggggtgcagaaggccgaggatttctggctagacaatgtaggtagtctacagtagttacacaaacggtaccgaatctgcatggtcttttcccttgtcactccctaacaataaaatgtaacatccacatgtgctgtttctgttgttttaggtgtggtaagcaatctgggagtgtttgggaggatgtgtgtaggttctacgtaaacactcgattttatatctgggactggaacatcctcctggaatctatcctcccatgagttccaggggtactttgctagaagggaatctctctgactagcttgtcatttaaaactgaatataaagttgttttatccacctcccccccaaccccatgacttggtgggaatttcaaatgtaccattacattcacacttcaaatgaaaaatttatgtccttaagaatggatggtttttcatacctggtgtcctgcctaggaacatgacctagctcttcatttattcatgtattcttttgtatgtgctcagttgagtgctgcagctacatcaagtcacccttggtgcacttcctccctgccctcgtacacggccagagaattgcctgtgtgccttgctaaggcagctcctagacaggttataattctagttggtttggtgggggatgggtttttttcttattgttttaataaaagccattgatctgcatgtgtagaagattgacatttgcatgtaatgttcattttatatgtataagcatatgcatttgtttacttatatatacattcattctccctcgttcagtaatttagctcttgtacggtttctaggtaggagatcatgtcatctgaaaagaattggattctttatttctacttttaaaaagctgtattattttatctatccatacctgggtagatcattctaccaggcttaatataagcactgatagtgttacatacacacacacacacacacacacacacacacacacacacacacacacacggcatggacatatacacatgcacctttctgctgattacaatggaagtgcccctagtacttcattaataaataaagtatttgttataaattagaagagctttggcttctatcttccctcttttcctgttagagaatggactgactgtcttttcctagtttcccaagcatttcccaaagattgctgagtcttatggccaaaatggcttgataatcggtgttcatactgtgtttctagacctatgtgcactaaatagtcccctgaggatcatggaggctgccctatgctcagaaaagctacagctgaaacataaaacctgctattaaggttgctttagagcctcacagacatcagtgggttgtactacaatgccattcaccttgttggttcttttaaaagaatttttttttaactgagactttgtgctatgcaaagtcctgggtaccttataacagaagtatgttcttcctttgtttccagtgatgccaatgccccctttgcccagtggagcacagaacgcgtatgtacatggatggaggatttcggcctgggtcagtatgtgatctttgccagacagtgggtgacatctggacatacactactgacagctacccctcaggacatggaaaaggtaagggctgagtgtgaggagcagatgcccctgctcttctcccagaacagagcttggggactagtgcatgggtaggtggtggcctccgtctatcccgtatacatggagaatgcacagggaagtctgcgattgccttttgctgcaggctaacatcccagtgctctgtgcacctaccgcaggctctaccaccaccctcaagagcatctctatcctgacatgacatcctctaaggaccaagttgtttgccaaaatctcacatgtggtcttcgtcttttgctttcaggagctagggattaaacaccccctccacaggaagaagctggttttagcagtgaaagctatcaacgccaagcaagaagaaacgtctgcgctgctggaccacatttgggtgacacgtaaggagagctgtaaatatttattgttctgaagggcaaaagaatctcctattgaatgtgtgcctcaaagacagcagcttacttgtgaaagacagatggattactagtgctttgggggaaggaaatcaaaagcctcaaaatgaccatttttgcctttccctcttggcacccatatccttttttcttatgaatgttaatgcatctgtttttgcagggtggcttgatgatattggcttaccccaatacaaagaccagtttcatgaatcaagagttgatgggcgaatgctgcaatacctaactgtggtaaggatttttccgtagtattttccagagagcactcagcccaggtctccccatgctcatcattttaaatgtgatcccctcctttctttgcagtttttttttttttggtaaagattcatttattcatgtattttatgtatatgagtgctctgtcttcctgcacaccaaaagaaattaggtcccattacagatggttgggagcccccgtgtggttgctgggattaaattcaggaccactagaagagcagttaatggctattatccactgagccatctctccaatcccacctttccttatattgttaaggccctgaaattgtactgttatcactcaaggcacatcatgtgccaacgtacaaaccatggtgataagcaaaactgtctgtgagagcctttctgagatgtggaaggcacatctctgtttggtcaggaaagaacagctgaggtcttttgttaccttagaaactgacttgtcagccagaacctttcttttccagaatgatctactcttcttaaaagtcaccagccaactacatcatctcagcatcaaatgtgctattcacgtgctacatgtcaacaagttcaaccccaactgcctgcacaggaggcctgctgatgaggtgggggagtgtactagttgtccagatggccctgagtcaggacacctgggatagcatgagaaaatgaggatgctttcatcacaaaatagatcatgatacttaagattctggtgcctgtaactctgttgctttctatggtggttttctaagtcatcataatgatctaaggatttgatgcagcataaaagagataaggaaagaaagtatggaaacatgggtgtcaaagtaggcagaggaggcagggtccaggggtcagaggggacaagagttctaaaagactggacagctcagagtgggttacttttcttgctggtataaaattaactagccttcagcctagatgacataggaccttactagaggggaactagtgtagacaaatgcaagggaccacatggctgatatacataataccattctataaactttaggatttcctgatatgccccaaactgagagcatgatccatagggatcatgtccaacctcctttgttgcagagaactggtctacctctggttctttaacggttttaaatacatgcctttgccatctagtctttgtttccttgctattcaacaaatatatcttgcatgtttcctgtgtgagtgctgaacattttgaagcctacaaggctgtgtgaaagtatatagacattactatattttttacaaatatttactttttatttgtgtgtatatttctcacacatgtatgagtgcctgcagaggtccgaagagttcatcagatctcttggatctggttgtgagctacgtggcatgggtgctagcaactgaacctgggtcctctagaacgacagtgagcattatactgctaagccatctctcaaaatgtcttagtgtgggttcccttaaacatttgcccatgccaaagagtatttttacctagaaaacacctggatcataaatgaatctttaaataaattctgttggattattgaataaaaacctgtatgtctgtctattggtattgccaaaatttaggatggtagattcagatagttaagcgtagatgtttcagcagaattcaataagatagtgatttttcaggactgggcatactcttaggtaagtggcccacatagcttgggtctgttgttctggtggagcaactgaggcaaggctcctcagaggtgctgactccacagagcctaacgttttgactctcctccatcacagagtaacctttccccttccgaagttgtgcagtggtccaaccacagggtaatggagtggctgcgatccgtggacctggcagagtatgcacccaaccttcgagggagtggcgtccatggcggcctcattgtgagtggctctctgggctagctcacatgccttagcccagactggggcattcccaaaacacctttctctcctagtattgttcatgttgctataatttaaaaaacaaaacaaacaaaacaaaaccaaaaaccctgaaaaaaaactaaacataagggagaagaaagggttttagcccagttacaggcttcagtccattgctacagggcaggcagtcatagggcaggagcttgaggtggctgctatcatgacatctgcagttgaaagaagatgatgaatacatgcatactgctcagttcttcttaactcttacaccatctagaagccatcccatgaagtggtgccagccatatttaggacagcctacctcagttaaccctattaagaaaagtccctcatattcatgcctgcaggccaccctcatctaggcagcagcccctccccgggcctcttcccagatgattctgctggacttgatgatcaaagctaagcctcgtactctgtaagggccaggcgttctagtgggaaaaaatgaggtacttcatttgacccatttgacagaactggaaatttctgaggtctctggctgagcattcctgggccttagagaaagagcttgggtgacttctgtgagattccctcagcgacagtccagaggattccagtcagccggctgcttgcatgagatcaactctgaacaaggccgttccacctgttcccagaggaacacgggggctggggaagtgggagaggtcagcaaaggcaatttcctgattgctatgatatgatctttatcaccacttagctctgtcaagtgtcaaagccagaagggaagtgtggaggcggtggcctaggatgccaccagagaagactctggttctctggtagcctgtgaacacgaggtcaagaaacatgctaggtcaacaagcaaagctaggccatatgctggggagacggcatgggtaggacatagatagagcacaggctctgttctggtggcacccagtacccagaggaatgagtttttacctctccctcaccccctgcccctgccgctccccagcgccctctacagtaaccactggctaggtttgtctgtgttttcttttttttttttttttccattttttattaggtatttagctcatttacatttccaatgctataccaaaagtcccccatacccacccacccccactcccctacctgcccactccccctttttggccttggcgttcccctgttctggggcatataaagtttgtgtgtccaaagggcctctctttccagtgatggccgactaggccatcttttgatacatatgcagctagagtcaagagctccggggtactggttagttctgtaaaaacagatcctgaagaaatccaaaacaccatcagatccttctacaaaaggctatactcaacaaaactggagaaactagatgaaatggacaagtttctcgacagataccaggtaccaaagttgaatcaggatcaagttgaccttctaaacagtcccatatcccctaaagaaatagaagcagttataaatagtctcccagccaaaaaaagcccaggaccagacgggtttagtgcagagttctatcagaccttcaaagaagatctaattccagttctgcacaaactttttcacaagatagaagtagaaagtactctacccaactcattttatgaagccactattactctgatacctaaaccacagaaagatccaacaaagatagagaacttcagaccaatttctcttatgaatatcgatgcaaaaatcctcaataaaattctcgctaaccgaatccaagaacacattaaagcaatcatccatcctgaccaagtaggttttattccaggaatgcagggatggtttaatatacgaaaatccatcaatgtaatccactatataaacaaactcaaagacaaaaaccacatgatcatctcgttggatgcagaaaaagcatttgacaagatccaacacccattcatgataaaagttctggaaagatcaggaattcaaggcccatacctaaacatgataaaagcaatctacagcaaaccagtagccaacatcaaagtaaatggagagaagctggaagcaatcccactaaaatcagggactagacaaggctgcccactttctccctaccttttcaacatagtacttgaagtattagccagagcaattcgacaacaaaaggagatcaaggggatacaaattggaaaggaggaagtcaaaattgtctgtgttttcttcttagatcctggagcctcgctttactggggacaccctggctatgcttcttaacatccccccacagaagacgctcctcaggcgccatctgaccaccaagttcaacgccctgattggtcctgaggctgaacaggaaaagcgagacaaaatggcctcacccgcctacacacctctgaccaccaccgccaaagttcgggtgagttgtcagagtctatgcgtgggtcccagcagcctgtcttctggtctttatgctaaacatctgttagttcaatgcctgggccaaaccaaggagtgcagccccacatgagggccatgcttggcttatgctcctgaggcctgttcatctttattagatccattccctacttggcctaagcccaggaaaacagcccaggtgtctgtacactgtaaacgtgtacaggaagtagctcttcctgggaagctgtagactctggctctgccaagcagatgggatctgggttccttcagtcaggcccatctgtgtgccataatgcctcggggtcttggtcacagccatcttactagcactaagagtgctctcatagcaacggttcctgcttgtgttctgtgatagagaacacaggcaggataatctgcacacagctgaccctagtgtcatccaagcgcctctcattctctggcctctctgaatcctacaaagtctagcccaagccacaccatcctcaggctgaatctatcctcaggccacaggtagcctccaggagctaagctgaactctccccaagcaatcattgggtccagctataccccctgcttgcatcccctttcctaaggatgcaggacaggttctatgtcttggggagtccaacagagcagcatgagtgaagctcaggcaaagaagaaggccagcccaggtccttccagggtctggatatccttatggctctgggcacccctcactcatgcatgtgccagcagctgtggtgagacaggccccctgtgcttgacttcaagagcagacagtagcattccagggcacccctcagtctaccttgggaaataggaagtttcttgggggtggggggagtggggctgagttttaggcacagcctcagaggaacagctctgtgttcaaggttattcatctgccggccttgcttcagcatacaactgggagtcctgcttcccacaccactttgatttctttcctcctgagctagctcccaagtacactgtaagttgcatctgcaccctgaccctggactccttctcatcatcttgcatttgctgtttcagcctaggaaacttggattttcacattttggaaacatgagaaaaaagaagtttgatgaatctacagattacatttgccccatggagcctggagatgctgtcagtgacagccacagggtctacggagtctaccggggcctcagtccccttgacaaccatgaactagatggtttggaccaggtgggacagataagctgatgaccctgttatctgccttctctgtgcacggagagctcacagtaacactgtgtgtcaccacgtaactgcacttcaccctcgtccttttgcatgatctacagaaaacaattgtgtctttgggctggtctcactacacactttaaggatggtcagaatatgcagttatacagccacaaaggggacagactttggggaactatagccaaatgtggactctgggaaaacacctgcagacattagtagatgtttagtaattcatagtatccatgtttcagcttgaaacacatgagcagagggcaggccctgggtaatcgcaaaaggttcagttctcagacgctgcccctattcttcagtcgagggaagaattcaagtgccttaggtttgtgagccacaaagtcttggctgagatcaaagtgccaacagcggatgtttggaccatagtgacaatgtaatttgattgtaccttactatagagtggccacttgtttctgataataaaaacaatatttatgtag

SEQ ID NO: 165 - DNA, 3355 bp, Mus musculus
accgggtcggtgctggcgggtctgccacttggttggcagttggtccttgggccagtggcctgtcactgggttctccgctcttatgttggaaagtgtgagggacacaggagcgacctgcatacctgagcctccgagagagaagctgcactctggcatccagtagcagcaggagactaagcagataaaaggagccatgacttctgacgctagtcatatgctggaagctgccctggagcagatggacgggatcattgcaggcactaaaacagctgcagattttagtgatggtacctgtgagcctgggctgtctcccccatccacctgcttgaactccatgcctgtgctccatctcattgaggacctgagactagccttggagatgttggcacttcctcaggaaagagaagccctcctgagccaggtccctggcccaacagctacctacataaaggagtggtttgaggacagcttgtcccaggtaaatcaccacggtgctgctagtaatgaaacctaccaggaacgcctggcacggctagaaggagataaagagtccctcatactacaggtgagcgtcctcacagatcaagtggaagcccaaggagagaagattcgggaccttgaagtgtgtctggaaggccaccaggtgaagctcaatgctgcagaagagatgcttcagcaggagctgctaagtcgcacatctctggagacccagaagttggatctgatgactgaggtgtctgagctgaagctcaagctggttggtatggaaaaagaacagaaagaacaagaagaaaaacagagaaaagcagaggagttactgcaagagcttaagcacctcaaaatcaaggtggaggagctggagaacgagcggaaccagtatgagtgggagctgaaggccaccaaggctgaggtagcccagctgcaagaacaggtggccctaaaagatgcagaaattgagcgtctccacagccagctctcccggagtgcagctctccacagcgaccatgcagagcgagatcaagaaatccaccgtctgaaaatggggatggaaacactgctggttgccaatgaggataaggaccgtcggatagaggagctgacagggctgttgaacaagtacctaagggtaaaggagattgtgatggcaactcaggggccttcagaaagaaccctctccatcaatgaagatgaaatagagggaagcttccgaaaatggaataccacaaataaaagcccagaggaagtcccgaagcaagagatatcaccacgatgcagctctcccaccccaggaccacctcctttgccacagaaatcactggagagcagggctcagaagaaactctcctgcagtctagaagacttgagacgtgaatctggggataagtgtgtcgatgggaaccagctgtccccagtgggagagcccaaggacagctctttcctagcggagcagaaataccccacattacctgggaagctttcaggagccacacccaatggagaagctgccaaatctcctcccactgcctccctccagcctgactcttcagggagcagccagccaaagctgaatcgcggctggagtgtcagtgctcccgtattaggagacacagaaggaggctgggaagatatagtctcatctgcttcgtctgggactgagtcaagccctcagtctcccgtgacaccagatggcaaacggagccccaaaggcattaagaagttctggggaaagatccgaagaactcagtctggaaacttcaatactgatgcaccggggatggcagagtttcgacgaggtgggctccgagcaactgcgggaccaaggctttctaggaccagggacaccaagggacagaaatgtgatgccaatgccccctttgcccagtggagcacagaacgcgtatgtacatggatggaggatttcggcctgggtcagtatgtgatctttgccagacagtgggtgacatctggacatacactactgacagctacccctcaggacatggaaaaggagctagggattaaacaccccctccacaggaagaagctggttttagcagtgaaagctatcaacgccaagcaagaagaaacgtctgcgctgctggaccacatttgggtgacacggtggcttgatgatattggcttaccccaatacaaagaccagtttcatgaatcaagagttgatgggcgaatgctgcaatacctaactgtgaatgatctactcttcttaaaagtcaccagccaactacatcatctcagcatcaaatgtgctattcacgtgctacatgtcaacaagttcaaccccaactgcctgcacaggaggcctgctgatgagagtaacctttccccttccgaagttgtgcagtggtccaaccacagggtaatggagtggctgcgatccgtggacctggcagagtatgcacccaaccttcgagggagtggcgtccatggcggcctcattatcctggagcctcgctttactggggacaccctggctatgcttcttaacatccccccacagaagacgctcctcaggcgccatctgaccaccaagttcaacgccctgattggtcctgaggctgaacaggaaaagcgagacaaaatggcctcacccgcctacacacctctgaccaccaccgccaaagttcggcctaggaaacttggattttcacattttggaaacatgagaaaaaagaagtttgatgaatctacagattacatttgccccatggagcctggagatgctgtcagtgacagccacagggtctacggagtctaccggggcctcagtccccttgacaaccatgaactagatggtttggaccaggtgggacagataagctgatgaccctgttatctgccttctctgtgcacggagagctcacagtaacactgtgtgtcaccacgtaactgcacttcaccctcgtccttttgcatgatctacagaaaacaattgtgtctttgggctggtctcactacacactttaaggatggtcagaatatgcagttatacagccacaaaggggacagactttggggaactatagccaaatgtggactctgggaaaacacctgcagacattagtagatgtttagtaattcatagtatccatgtttcagcttgaaacacatgagcagagggcaggccctgggtaatcgcaaaaggttcagttctcagacgctgcccctattcttcagtcgagggaagaattcaagtgccttaggtttgtgagccacaaagtcttggctgagatcaaagtgccaacagcggatgtttggaccatagtgacaatgtaatttgattgtaccttactatagagtggccacttgtttctgataataaaaacaatatttatgt

SEQ ID NO: 166 - protein, 870 aa, Mus musculus
MTSDASHMLEAALEQMDGIIAGTKTAADFSDGTCEPGLSPPSTCLNSMPVLHLIEDLRLALEMLALPQEREALLSQVPGPTATYIKEWFEDSLSQVNHHGANETYQERLARLEGDKESLILQVSVLTDQVEAQGEKIRDLEVCLEGHQVKLNAAEEMLQQELLSRTSLETQKLDLMTEVSELKLKLVGMEKEQKEQEEKQRKAEELLQELKHLKIKVEELENERNQYEWELKATKAEVAQLQEQVKDAEIERLHSQLSRSAALHSDHAERDQEIHRLKMGMLLVANEDKDRRIEELTGLLNKYLRVKEIVMATQGPSTLSINEDEIEGSFRKWNTTNKSPEEVPKQEISPRCSSPTPGPPPLPQKSLESRAQKKLSCSLEDLRRESGDKCVDGNQLSPVGEPKDSSFLAEQKYPTLPGKLSGATPNGEAAKSPPTASLQPDSSGSSQPKLNRGWSVSAPVLGDTEGGWEDIVSSASSGTESSPQSPVTPDGKRSPKGIKKFWGKIRRTQSGNFNTDAPGMAEFRRGGLRATAGPRLSRTRDTKGQKCDANAPFAQWSTERVCTWMEDFGLGQYVIFARQWVTSGHTLLTATPQDMEKELGIKHPLHRKKLVLAVKAINAKQEETSALLDHIWVTRWLDDIGLPQYKDQFHESRVDGRMLQYLTVNDLLFLKVTSQLHHLSIKCAIHVLHVNKFNPNCLHRRPADESNLSPSEVVQWSNHRVMEWLRSVDLAEYAPNLRGSGVHGGLIIPRFTGDTLAMLLNIPPQKTLLRRHLTTKFNALIGPEAEQEKRDKMDAYTPLTTTAKVRPRKLGFSHFGNMRKKKFDESTDYICPMEPGDAVSDSHRVYGVYRGLSPLDNHELDGLDQVGQIS

SEQ ID NO: 167 - DNA, 3278 bp, Mus musculus
ttgggccagtggcctgtcactgggttctccgctcttatgttggaaagtgtgagggacacaggagcgacctgcatacctgagcctccgagagagaagctgcactctggcatccagtagcagcaggagactaagcagataaaaggagccatgacttctgacgctagtcatatgctggaagctgccctggagcagatggacgggatcattgcaggcactaaaacagctgcagattttagtgatggtacctgtgagcctgggctgtctcccccatccacctgcttgaactccatgcctgtgctccatctcattgaggacctgagactagccttggagatgttggcacttcctcaggaaagagaagccctcctgagccaggtccctggcccaacagctacctacataaaggagtggtttgaggacagcttgtcccaggtaaatcaccacggtgctgctagtaatgaaacctaccaggaacgcctggcacggctagaaggagataaagagtccctcatactacaggtgagcgtcctcacagatcaagtggaagcccaaggagagaagattcgggaccttgaagtgtgtctggaaggccaccaggtgaagctcaatgctgcagaagagatgcttcagcaggagctgctaagtcgcacatctctggagacccagaagttggatctgatgactgaggtgtctgagctgaagctcaagctggttggtatggaaaaagaacagaaagaacaagaagaaaaacagagaaaagcagaggagttactgcaagagcttaagcacctcaaaatcaaggtggaggagctggagaacgagcggaaccagtatgagtgggagctgaaggccaccaaggctgaggtagcccagctgcaagaacaggtggccctaaaagatgcagaaattgagcgtctccacagccagctctcccggagtgcagctctccacagcgaccatgcagagcgagatcaagaaatccaccgtctgaaaatggggatggaaacactgctggttgccaatgaggataaggaccgtcggatagaggagctgacagggctgttgaacaagtacctaagggtaaaggagattgtgatggcaactcaggggccttcagaaagaaccctctccatcaatgaagatgaaatagagggaagcttccgaaaatggaataccacaaataaaagcccagaggaagtcccgaagcaagagatatcaccacgatgcagctctcccaccccaggaccacctcctttgccacagaaatcactggagagcagggctcagaagaaactctcctgcagtctagaagacttgagacgtgaatctggggataagtgtgtcgatgggaaccagctgtccccagtgggagagcccaaggacagctctttcctagcggagcagaaataccccacattacctgggaagctttcaggagccacacccaatggagaagctgccaaatctcctcccactgcctccctccagcctgactcttcagggagcagccagccaaagctgagagacacagaaggaggctgggaagatatagtctcatctgcttcgtctgggactgagtcaagccctcagtctcccgtgacaccagatggcaaacggagccccaaaggcattaagaagttctggggaaagatccgaagaactcagtctggaaacttcaatactgatgcaccggggatggcagagtttcgacgaggtgggctccgagcaactgcgggaccaaggctttctaggaccagggacaccaagggacagaaatgtgatgccaatgccccctttgcccagtggagcacagaacgcgtatgtacatggatggaggatttcggcctgggtcagtatgtgatctttgccagacagtgggtgacatctggacatacactactgacagctacccctcaggacatggaaaaggagctagggattaaacaccccctccacaggaagaagctggttttagcagtgaaagctatcaacgccaagcaagaagaaacgtctgcgctgctggaccacatttgggtgacacggtggcttgatgatattggcttaccccaatacaaagaccagtttcatgaatcaagagttgatgggcgaatgctgcaatacctaactgtgaatgatctactcttcttaaaagtcaccagccaactacatcatctcagcatcaaatgtgctattcacgtgctacatgtcaacaagttcaaccccaactgcctgcacaggaggcctgctgatgagagtaacctttccccttccgaagttgtgcagtggtccaaccacagggtaatggagtggctgcgatccgtggacctggcagagtatgcacccaaccttcgagggagtggcgtccatggcggcctcattatcctggagcctcgctttactggggacaccctggctatgcttcttaacatccccccacagaagacgctcctcaggcgccatctgaccaccaagttcaacgccctgattggtcctgaggctgaacaggaaaagcgagacaaaatggcctcacccgcctacacacctctgaccaccaccgccaaagttcggcctaggaaacttggattttcacattttggaaacatgagaaaaaagaagtttgatgaatctacagattacatttgccccatggagcctggagatgctgtcagtgacagccacagggtctacggagtctaccggggcctcagtccccttgacaaccatgaactagatggtttggaccaggtgggacagataagctgatgaccctgttatctgccttctctgtgcacggagagctcacagtaacactgtgtgtcaccacgtaactgcacttcaccctcgtccttttgcatgatctacagaaaacaattgtgtctttgggctggtctcactacacactttaaggatggtcagaatatgcagttatacagccacaaaggggacagactttggggaactatagccaaatgtggactctgggaaaacacctgcagacattagtagatgtttagtaattcatagtatccatgtttcagcttgaaacacatgagcagagggcaggccctgggtaatcgcaaaaggttcagttctcagacgctgcccctattcttcagtcgagggaagaattcaagtgccttaggtttgtgagccacaaagtcttggctgagatcaaagtgccaacagcggatgtttggaccatagtgacaatgtaatttgattgtaccttactatagagtggccacttgtttctgataataaaaacaatatttatgtag

SEQ ID NO: 168 - protein, 859 aa, Mus musculus
MTSDASHMLEAALEQMDGIIAGTKTAADFSDGTCEPGLSPPSTCLNSMPVLHLIEDLRLALEMLALPQEREALLSQVPGPTATYIKEWFEDSLSQVNHHGANETYQERLARLEGDKESLILQVSVLTDQVEAQGEKIRDLEVCLEGHQVKLNAAEEMLQQELLSRTSLETQKLDLMTEVSELKLKLVGMEKEQKEQEEKQRKAEELLQELKHLKIKVEELENERNQYEWELKATKAEVAQLQEQVKDAEIERLHSQLSRSAALHSDHAERDQEIHRLKMGMLLVANEDKDRRIEELTGLLNKYLRVKEIVMATQGPSTLSINEDEIEGSFRKWNTTNKSPEEVPKQEISPRCSSPTPGPPPLPQKSLESRAQKKLSCSLEDLRRESGDKCVDGNQLSPVGEPKDSSFLAEQKYPTLPGKLSGATPNGEAAKSPPTASLQPDSSGSSQPKLRDTEGGWEDIVSSASSGTESSPQSPVTPDGKRSPKGIKKFWGKIRRTQSGNFNTDAPGMAEFRRGGLRATAGPRLSRTRDTKGQKCDANAPFAQWSTERVCTWMEDFGLGQYVIFARQWVTSGHTLLTATPQDMEKELGIKHPLHRKKLVLAVKAINAKQEETSALLDHIWVTRWLDDIGLPQYKDQFHESRVDGRMLQYLTVNDLLFLKVTSQLHHLSIKCAIHVLHVNKFNPNCLHRRPADESNLSPSEVVQWSNHRVMEWLRSVDLAEYAPNLRGSGVHGGLIIPRFTGDTLAMLLNIPPQKTLLRRHLTTKFNALIGPEAEQEKRDKMDAYTPLTTTAKVRPRKLGFSHFGNMRKKKFDESTDYICPMEPGDAVSDSHRVYGVYRGLSPLDNHELDGLDQVGQIS

SEQ ID NO: 169 - DNA, 2806 bp, Mus musculus
ccactccagaaaggagaagccagacaaggcattttcttccggactgtttccctctggcaggctctgtcccaggtaaatcaccacggtgctgctagtaatgaaacctaccaggaacgcctggcacggctagaaggagataaagagtccctcatactacaggtgagcgtcctcacagatcaagtggaagcccaaggagagaagattcgggaccttgaagtgtgtctggaaggccaccaggtgaagctcaatgctgcagaagagatgcttcagcaggagctgctaagtcgcacatctctggagacccagaagttggatctgatgactgaggtgtctgagctgaagctcaagctggttggtatggaaaaagaacagaaagaacaagaagaaaaacagagaaaagcagaggagttactgcaagagcttaagcacctcaaaatcaaggtggaggagctggagaacgagcggaaccagtatgagtgggagctgaaggccaccaaggctgaggtagcccagctgcaagaacaggtggccctaaaagatgcagaaattgagcgtctccacagccagctctcccggagtgcagctctccacagcgaccatgcagagcgagatcaagaaatccaccgtctgaaaatggggatggaaacactgctggttgccaatgaggataaggaccgtcggatagaggagctgacagggctgttgaacaagtacctaagggtaaaggagattgtgatggcaactcaggggccttcagaaagaaccctctccatcaatgaagatgaaatagagggaagcttccgaaaatggaataccacaaataaaagcccagaggaagtcccgaagcaagagatatcaccacgatgcagctctcccaccccaggaccacctcctttgccacagaaatcactggagagcagggctcagaagaaactctcctgcagtctagaagacttgagacgtgaatctggggataagtgtgtcgatgggaaccagctgtccccagtgggagagcccaaggacagctctttcctagcggagcagaaataccccacattacctgggaagctttcaggagccacacccaatggagaagctgccaaatctcctcccactgcctccctccagcctgactcttcagggagcagccagccaaagctgaatcgcggctggagtgtcagtgctcccgtattaggagacacagaaggaggctgggaagatatagtctcatctgcttcgtctgggactgagtcaagccctcagtctcccgtgacaccagatggcaaacggagccccaaaggcattaagaagttctggggaaagatccgaagaactcagtctggaaacttcaatactgatgcaccggggatggcagagtttcgacgaggtgggctccgagcaactgcgggaccaaggctttctaggaccagggacaccaagggacagaaatgtgatgccaatgccccctttgcccagtggagcacagaacgcgtatgtacatggatggaggatttcggcctgggtcagtatgtgatctttgccagacagtggctggaccacatttgggtgacacggtggcttgatgatattggcttaccccaatacaaagaccagtttcatgaatcaagagttgatgggcgaatgctgcaatacctaactgtgaatgatctactcttcttaaaagtcaccagccaactacatcatctcagcatcaaatgtgctattcacgtgctacatgtcaacaagttcaaccccaactgcctgcacaggaggcctgctgatgagagtaacctttccccttccgaagttgtgcagtggtccaaccacagggtaatggagtggctgcgatccgtggacctggcagagtatgcacccaaccttcgagggagtggcgtccatggcggcctcattatcctggagcctcgctttactggggacaccctggctatgcttcttaacatccccccacagaagacgctcctcaggcgccatctgaccaccaagttcaacgccctgattggtcctgaggctgaacaggaaaagcgagacaaaatggcctcacccgcctacacacctctgaccaccaccgccaaagttcggcctaggaaacttggattttcacattttggaaacatgagaaaaaagaagtttgatgaatctacagattacatttgccccatggagcctggagatgctgtcagtgacagccacagggtctacggagtctaccggggcctcagtccccttgacaaccatgaactagatggtttggaccaggtgggacagataagctgatgaccctgttatctgccttctctgtgcacggagagctcacagtaacactgtgtgtcaccacgtaactgcacttcaccctcgtccttttgcatgatctacagaaaacaattgtgtctttgggctggtctcactacacactttaaggatggtcagaatatgcagttatacagccacaaaggggacagactttggggaactatagccaaatgtggactctgggaaaacacctgcagacattagtagatgtttagtaattcatagtatccatgtttcagcttgaaacacatgagcagagggcaggccctgggtaatcgcaaaaggttcagttctcagacgctgcccctattcttcagtcgagggaagaattcaagtgccttaggtttgtgagccacaaagtcttggctgagatcaaagtgccaacagcggatgtttggaccatagtgacaatgtaatttgattgtaccttactatagagtggccacttgtttctgataataaaaacaatatttat

SEQ ID NO: 170 - protein, 667 aa, Mus musculus
MLQQELLSRTSLETQKLDLMTEVSELKLKLVGMEKEQKEQEEKQRKAEELLQELKHLKIKVEELENERNQYEWELKATKAEVAQLQEQVKDAEIERLHSQLSRSAALHSDHAERDQEIHRLKMGMLLVANEDKDRRIEELTGLLNKYLRVKEIVMATQGPSTLSINEDEIEGSFRKWNTTNKSPEEVPKQEISPRCSSPTPGPPPLPQKSLESRAQKKLSCSLEDLRRESGDKCVDGNQLSPVGEPKDSSFLAEQKYPTLPGKLSGATPNGEAAKSPPTASLQPDSSGSSQPKLNRGWSVSAPVLGDTEGGWEDIVSSASSGTESSPQSPVTPDGKRSPKGIKKFWGKIRRTQSGNFNTDAPGMAEFRRGGLRATAGPRLSRTRDTKGQKCDANAPFAQWSTERVCTWMEDFGLGQYVIFARQWLDHIWVTRWLDDIGLPQYKDQFHESRVDGRMLQYLTVNDLLFLKVTSQLHHLSIKCAIHVLHVNKFNPNCLHRRPADESNLSPSEVVQWSNHRVMEWLRSVDLAEYAPNLRGSGVHGGLIIPRFTGDTLAMLLNIPPQKTLLRRHLTTKFNALIGPEAEQEKRDKMDAYTPLTTTAKVRPRKLGFSHFGNMRKKKFDESTDYICPMEPGDAVSDSHRVYGVYRGLSPLDNHELDGLDQVGQIS

SEQ ID NO: 171 - DNA, 2959 bp, Mus musculus
cctgagttcggaagtcatttaactcattctcagccccgatggtatccggagcagagggtatatttgtcgccagcccgtcccaggtaaatcaccacggtgctgctagtaatgaaacctaccaggaacgcctggcacggctagaaggagataaagagtccctcatactacaggtgagcgtcctcacagatcaagtggaagcccaaggagagaagattcgggaccttgaagtgtgtctggaaggccaccaggtgaagctcaatgctgcagaagagatgcttcagcaggagctgctaagtcgcacatctctggagacccagaagttggatctgatgactgaggtgtctgagctgaagctcaagctggttggtatggaaaaagaacagaaagaacaagaagaaaaacagagaaaagcagaggagttactgcaagagcttaagcacctcaaaatcaaggtggaggagctggagaacgagcggaaccagtatgagtgggagctgaaggccaccaaggctgaggtagcccagctgcaagaacaggtggccctaaaagatgcagaaattgagcgtctccacagccagctctcccggagtgcagctctccacagcgaccatgcagagcgagatcaagaaatccaccgtctgaaaatggggatggaaacactgctggttgccaatgaggataaggaccgtcggatagaggagctgacagggctgttgaacaagtacctaagggtaaaggagattgtgatggcaactcaggggccttcagaaagaaccctctccatcaatgaagatgaaatagagggaagcttccgaaaatggaataccacaaataaaagcccagaggaagtcccgaagcaagagatatcaccacgatgcagctctcccaccccaggaccacctcctttgccacagaaatcactggagagcagggctcagaagaaactctcctgcagtctagaagacttgagacgtgaatctggggataagtgtgtcgatgggaaccagctgtccccagtgggagagcccaaggacagctctttcctagcggagcagaaataccccacattacctgggaagctttcaggagccacacccaatggagaagctgccaaatctcctcccactgcctccctccagcctgactcttcagggagcagccagccaaagctgaatcgcggctggagtgtcagtgctcccgtattaggagacacagaaggaggctgggaagatatagtctcatctgcttcgtctgggactgagtcaagccctcagtctcccgtgacaccagatggcaaacggagccccaaaggcattaagaagttctggggaaagatccgaagaactcagtctggaaacttcaatactgatgcaccggggatggcagagtttcgacgaggtgggctccgagcaactgcgggaccaaggctttctaggaccagggacaccaagggacagaaatgtgatgccaatgccccctttgcccagtggagcacagaacgcgtatgtacatggatggaggatttcggcctgggtcagtatgtgatctttgccagacagtgggtgacatctggacatacactactgacagctacccctcaggacatggaaaaggagctagggattaaacaccccctccacaggaagaagctggttttagcagtgaaagctatcaacgccaagcaagaagaaacgtctgcgctgctggaccacatttgggtgacacggtggcttgatgatattggcttaccccaatacaaagaccagtttcatgaatcaagagttgatgggcgaatgctgcaatacctaactgtgaatgatctactcttcttaaaagtcaccagccaactacatcatctcagcatcaaatgtgctattcacgtgctacatgtcaacaagttcaaccccaactgcctgcacaggaggcctgctgatgagagtaacctttccccttccgaagttgtgcagtggtccaaccacagggtaatggagtggctgcgatccgtggacctggcagagtatgcacccaaccttcgagggagtggcgtccatggcggcctcattatcctggagcctcgctttactggggacaccctggctatgcttcttaacatccccccacagaagacgctcctcaggcgccatctgaccaccaagttcaacgccctgattggtcctgaggctgaacaggaaaagcgagacaaaatggcctcacccgcctacacacctctgaccaccaccgccaaagttcggcctaggaaacttggattttcacattttggaaacatgagaaaaaagaagtttgatgaatctacagattacatttgccccatggagcctggagatgctgtcagtgacagccacagggtctacggagtctaccggggcctcagtccccttgacaaccatgaactagatggtttggaccaggtgggacagataagctgatgaccctgttatctgccttctctgtgcacggagagctcacagtaacactgtgtgtcaccacgtaactgcacttcaccctcgtccttttgcatgatctacagaaaacaattgtgtctttgggctggtctcactacacactttaaggatggtcagaatatgcagttatacagccacaaaggggacagactttggggaactatagccaaatgtggactctgggaaaacacctgcagacattagtagatgtttagtaattcatagtatccatgtttcagcttgaaacacatgagcagagggcaggccctgggtaatcgcaaaaggttcagttctcagacgctgcccctattcttcagtcgagggaagaattcaagtgccttaggtttgtgagccacaaagtcttggctgagatcaaagtgccaacagcggatgtttggaccatagtgacaatgtaatttgattgtaccttactatagagtggccacttgtttctgataataaaaacaatatttatg

SEQ ID NO: 172 - protein, 788 aa, Mus musculus
MVSGAEGIFVDSQVNHHGANETYQERLARLEGDKESLILQVSVLTDQVEAQGEKIRDLEVCLEGHQVKLNAAEEMLQQELLSRTSLETQKLDLMTEVSELKLKLVGMEKEQKEQEEKQRKAEELLQELKHLKIKVEELENERNQYEWELKATKAEVAQLQEQVKDAEIERLHSQLSRSAALHSDHAERDQEIHRLKMGMLLVANEDKDRRIEELTGLLNKYLRVKEIVMATQGPSTLSINEDEIEGSFRKWNTTNKSPEEVPKQEISPRCSSPTPGPPPLPQKSLESRAQKKLSCSLEDLRRESGDKCVDGNQLSPVGEPKDSSFLAEQKYPTLPGKLSGATPNGEAAKSPPTASLQPDSSGSSQPKLNRGWSVSAPVLGDTEGGWEDIVSSASSGTESSPQSPVTPDGKRSPKGIKKFWGKIRRTQSGNFNTDAPGMAEFRRGGLRATAGPRLSRTRDTKGQKCDANAPFAQWSTERVCTWMEDFGLGQYVIFARQWVTSGHTLLTATPQDMEKELGIKHPLHRKKLVLAVKAINAKQEETSALLDHIWVTRWLDDIGLPQYKDQFHESRVDGRMLQYLTVNDLLFLKVTSQLHHLSIKCAIHVLHVNKFNPNCLHRRPADESNLSPSEVVQWSNHRVMEWLRSVDLAEYAPNLRGSGVHGGLIIPRFTGDTLAMLLNIPPQKTLLRRHLTTKFNALIGPEAEQEKRDKMDAYTPLTTTAKVRPRKLGFSHFGNMRKKKFDESTDYICPMEPGDAVSDSHRVYGVYRGLSPLDNHELDGLDQVGQIS

SEQ ID NO: 173 - DNA, 2223 bp, Mus musculus
gcctctcttgcttcttcatgtggcttctctgcttctgggttgctgaagatcgcggctggagtgtcagtgctcccgtattaggtactgtgactgttcaggtgaggtagaatgtgagaatacctttggtttccatttctcatgccctgcccacattccagaatctccctctgactaaatagcaagctctttattggaatagtctacaattacttgaaccccaaagtcttagaatttgaagacattaaatcctccaaattctaaactctggcctcactcgtttttagtgagagtccttggaagtgttctcaaactcttttggctccaggcatcttggtatggagctcaatgataaaggcagcattgggaagaatgctctggactcccgtagaaggatagctctggtgtaggggtggggttccgaaggttccccctcccattcattcacataccttttcattctgtccaccttaggagacacagaaggaggctgggaagatatagtctcatctgcttcgtctgggactgagtcaagccctcagtctcccgtgacaccagatggcaaacggagccccaaaggcattaagaagttctggggaaagatccgaagaactcagtctggaaacttcaatactgatgcaccggggatggcagagtttcgacgaggtgggctccgagcaactgcgggaccaaggctttctaggaccagggacaccaagggacagaaatgtgatgccaatgccccctttgcccagtggagcacagaacgcgtatgtacatggatggaggatttcggcctgggtcagtatgtgatctttgccagacagtgggtgacatctggacatacactactgacagctacccctcaggacatggaaaaggagctagggattaaacaccccctccacaggaagaagctggttttagcagtgaaagctatcaacgccaagcaagaagaaacgtctgcgctgctggaccacatttgggtgacacggtggcttgatgatattggcttaccccaatacaaagaccagtttcatgaatcaagagttgatgggcgaatgctgcaatacctaactgtgaatgatctactcttcttaaaagtcaccagccaactacatcatctcagcatcaaatgtgctattcacgtgctacatgtcaacaagttcaaccccaactgcctgcacaggaggcctgctgatgagagtaacctttccccttccgaagttgtgcagtggtccaaccacagggtaatggagtggctgcgatccgtggacctggcagagtatgcacccaaccttcgagggagtggcgtccatggcggcctcattatcctggagcctcgctttactggggacaccctggctatgcttcttaacatccccccacagaagacgctcctcaggcgccatctgaccaccaagttcaacgccctgattggtcctgaggctgaacaggaaaagcgagacaaaatggcctcacccgcctacacacctctgaccaccaccgccaaagttcggcctaggaaacttggattttcacattttggaaacatgagaaaaaagaagtttgatgaatctacagattacatttgccccatggagcctggagatgctgtcagtgacagccacagggtctacggagtctaccggggcctcagtccccttgacaaccatgaactagatggtttggaccaggtgggacagataagctgatgaccctgttatctgccttctctgtgcacggagagctcacagtaacactgtgtgtcaccacgtaactgcacttcaccctcgtccttttgcatgatctacagaaaacaattgtgtctttgggctggtctcactacacactttaaggatggtcagaatatgcagttatacagccacaaaggggacagactttggggaactatagccaaatgtggactctgggaaaacacctgcagacattagtagatgtttagtaattcatagtatccatgtttcagcttgaaacacatgagcagagggcaggccctgggtaatcgcaaaaggttcagttctcagacgctgcccctattcttcagtcgagggaagaattcaagtgccttaggtttgtgagccacaaagtcttggctgagatcaaagtgccaacagcggatgtttggaccatagtgacaatgtaatttgattgtaccttactatagagtggccacttgtttctgataataaaaacaatatttat

SEQ ID NO: 174 - protein, 351 aa, Mus musculus
MAEFRRGGLRATAGPRLSRTRDTKGQKCDANAPFAQWSTERVCTWMEDFGLGQYVIFARQWVTSGHTLLTATPQDMEKELGIKHPLHRKKLVLAVKAINAKQEETSALLDHIWVTRWLDDIGLPQYKDQFHESRVDGRMLQYLTVNDLLFLKVTSQLHHLSIKCAIHVLHVNKFNPNCLHRRPADESNLSPSEVVQWSNHRVMEWLRSVDLAEYAPNLRGSGVHGGLIIPRFTGDTLAMLLNIPPQKTLLRRHLTTKFNALIGPEAEQEKRDKMDAYTPLTTTAKVRPRKLGFSHFGNMRKKKFDESTDYICPMEPGDAVSDSHRVYGVYRGLSPLDNHELDGLDQVGQIS

SEQ ID NO: 175 - DNA, 3051 bp, Mus musculus
tgtgacccactccatgctttccagggctccttctgacctggagccactccccacgtctcatggaaactcacccttcctatctccctgctctgtgaagcaggtcctgcagaggtgaaaagagcagggaggcagacccaggactttactgaggcagtaatccctggtgtgtcccaggtaaatcaccacggtgctgctagtaatgaaacctaccaggaacgcctggcacggctagaaggagataaagagtccctcatactacaggtgagcgtcctcacagatcaagtggaagcccaaggagagaagattcgggaccttgaagtgtgtctggaaggccaccaggtgaagctcaatgctgcagaagagatgcttcagcaggagctgctaagtcgcacatctctggagacccagaagttggatctgatgactgaggtgtctgagctgaagctcaagctggttggtatggaaaaagaacagaaagaacaagaagaaaaacagagaaaagcagaggagttactgcaagagcttaagcacctcaaaatcaaggtggaggagctggagaacgagcggaaccagtatgagtgggagctgaaggccaccaaggctgaggtagcccagctgcaagaacaggtggccctaaaagatgcagaaattgagcgtctccacagccagctctcccggagtgcagctctccacagcgaccatgcagagcgagatcaagaaatccaccgtctgaaaatggggatggaaacactgctggttgccaatgaggataaggaccgtcggatagaggagctgacagggctgttgaacaagtacctaagggtaaaggagattgtgatggcaactcaggggccttcagaaagaaccctctccatcaatgaagatgaaatagagggaagcttccgaaaatggaataccacaaataaaagcccagaggaagtcccgaagcaagagatatcaccacgatgcagctctcccaccccaggaccacctcctttgccacagaaatcactggagagcagggctcagaagaaactctcctgcagtctagaagacttgagacgtgaatctggggataagtgtgtcgatgggaaccagctgtccccagtgggagagcccaaggacagctctttcctagcggagcagaaataccccacattacctgggaagctttcaggagccacacccaatggagaagctgccaaatctcctcccactgcctccctccagcctgactcttcagggagcagccagccaaagctgaatcgcggctggagtgtcagtgctcccgtattaggagacacagaaggaggctgggaagatatagtctcatctgcttcgtctgggactgagtcaagccctcagtctcccgtgacaccagatggcaaacggagccccaaaggcattaagaagttctggggaaagatccgaagaactcagtctggaaacttcaatactgatgcaccggggatggcagagtttcgacgaggtgggctccgagcaactgcgggaccaaggctttctaggaccagggacaccaagggacagaaatgtgatgccaatgccccctttgcccagtggagcacagaacgcgtatgtacatggatggaggatttcggcctgggtcagtatgtgatctttgccagacagtgggtgacatctggacatacactactgacagctacccctcaggacatggaaaaggagctagggattaaacaccccctccacaggaagaagctggttttagcagtgaaagctatcaacgccaagcaagaagaaacgtctgcgctgctggaccacatttgggtgacacggtggcttgatgatattggcttaccccaatacaaagaccagtttcatgaatcaagagttgatgggcgaatgctgcaatacctaactgtgaatgatctactcttcttaaaagtcaccagccaactacatcatctcagcatcaaatgtgctattcacgtgctacatgtcaacaagttcaaccccaactgcctgcacaggaggcctgctgatgagagtaacctttccccttccgaagttgtgcagtggtccaaccacagggtaatggagtggctgcgatccgtggacctggcagagtatgcacccaaccttcgagggagtggcgtccatggcggcctcattatcctggagcctcgctttactggggacaccctggctatgcttcttaacatccccccacagaagacgctcctcaggcgccatctgaccaccaagttcaacgccctgattggtcctgaggctgaacaggaaaagcgagacaaaatggcctcacccgcctacacacctctgaccaccaccgccaaagttcggcctaggaaacttggattttcacattttggaaacatgagaaaaaagaagtttgatgaatctacagattacatttgccccatggagcctggagatgctgtcagtgacagccacagggtctacggagtctaccggggcctcagtccccttgacaaccatgaactagatggtttggaccaggtgggacagataagctgatgaccctgttatctgccttctctgtgcacggagagctcacagtaacactgtgtgtcaccacgtaactgcacttcaccctcgtccttttgcatgatctacagaaaacaattgtgtctttgggctggtctcactacacactttaaggatggtcagaatatgcagttatacagccacaaaggggacagactttggggaactatagccaaatgtggactctgggaaaacacctgcagacattagtagatgtttagtaattcatagtatccatgtttcagcttgaaacacatgagcagagggcaggccctgggtaatcgcaaaaggttcagttctcagacgctgcccctattcttcagtcgagggaagaattcaagtgccttaggtttgtgagccacaaagtcttggctgagatcaaagtgccaacagcggatgtttggaccatagtgacaatgtaatttgattgtaccttactatagagtggccacttgtttctgataataaaaacaatatttatgt

SEQ ID NO: 176 - protein, 714 aa, Mus musculus
MLQQELLSRTSLETQKLDLMTEVSELKLKLVGMEKEQKEQEEKQRKAEELLQELKHLKIKVEELENERNQYEWELKATKAEVAQLQEQVKDAEIERLHSQLSRSAALHSDHAERDQEIHRLKMGMLLVANEDKDRRIEELTGLLNKYLRVKEIVMATQGPSTLSINEDEIEGSFRKWNTTNKSPEEVPKQEISPRCSSPTPGPPPLPQKSLESRAQKKLSCSLEDLRRESGDKCVDGNQLSPVGEPKDSSFLAEQKYPTLPGKLSGATPNGEAAKSPPTASLQPDSSGSSQPKLNRGWSVSAPVLGDTEGGWEDIVSSASSGTESSPQSPVTPDGKRSPKGIKKFWGKIRRTQSGNFNTDAPGMAEFRRGGLRATAGPRLSRTRDTKGQKCDANAPFAQWSTERVCTWMEDFGLGQYVIFARQWVTSGHTLLTATPQDMEKELGIKHPLHRKKLVLAVKAINAKQEETSALLDHIWVTRWLDDIGLPQYKDQFHESRVDGRMLQYLTVNDLLFLKVTSQLHHLSIKCAIHVLHVNKFNPNCLHRRPADESNLSPSEVVQWSNHRVMEWLRSVDLAEYAPNLRGSGVHGGLIIPRFTGDTLAMLLNIPPQKTLLRRHLTTKFNALIGPEAEQEKRDKMDAYTPLTTTAKVRPRKLGFSHFGNMRKKKFDESTDYICPMEPGDAVSDSHRVYGVYRGLSPLDNHELDGLDQVGQIS

SEQ ID NO: 177 - DNA, 157305 bp, Homo sapiens
  misc_feature (1)...(157305): n = A,T,C or G
gtaggtgaaaggggaagaggtccactgcaaaagtaaaggacacgggaaggatggcagagaatgtagggttgggagcagtttgttgatggatttggttgttgaaaattcattattcattcagaaaatatggaactactatgtgccagatgctattctaggaacaaggcatacagtagtgaatgaaacagataagacaaagcttataccctcatggagtttatattttattgaggggaattaagcaataatatgctaataacaaatgtatgtcagacaaaagataataagcactatggagaaaaatgatctagggtaaaggagtccctggagagctggagaagagggttgccttttttatagggtgacgggaaaaggtctaaatgaccaaggaccatttgagaacaggcataaaggcagcaagggaggaagtcatgtagatatttgtttccaagcagagggaacgaaaagtgccaagtccccaaggcaggagtgtgtttggtacaatctgagaaatagcagaagtcagtgtgatagaacaaaacgaacaaggtggagaagttgtaggggacaaggagagggagaacaaagagagaagcagtaggagaacagcttatatgtggctttggaggtaaaggcctgagctttatccatttcactctgagtgaaatgagaagccaatggagggtttcaagcagacacaggacatgatgtgacttacattttaaaagcacgcctttggctgctgtgggaattggactatgggaggcaagtatggaggcatgaacaccatgtaggagactgctacagtagtccaggcaggagatgatgtagttctcctaggattgcttctactttctcacggagtaagtgggaagatctccatgcgagggtatgacagaggcttgcagggagatgagaaagtgtgatagtcatatggaaagcatgataggactgctgcccacacagctggcatatagcaaacagtttgctaacatgcttgcttacctccgaacctctggaacccatctcactatgcatctctcttcctcctgtccagtcttctttccttcatcctgtttcttgtcctctgactccagttgaccttcagtgggctttaagaacccaagcactgattaggaaaatgacaacctgctgctgacacatccagcattttttttttttttttttagacagggtctggctctctcactcaggctggaaagcagtggcacaatctgagctcactgcaatctccacctcctgagtgcatgtgaccctcctacctcagcctcctgagtagctgggactacaggtacacgcccccacacctagctaattattgtattttttttttttttttagagatggggtctcactctgttgcccaggctggtcttgaactcctgagatcaagtgatttgtctgccttggccttccacagtgctgggcttacaggtgtgagccacggtgcctggtccacatccagcttcttataccaaaccctttcaaaggatttgaaggagctcctcagagtgctcagttgtcctttaaagactctatctaactatcattccactacctcacacccagaagtcaatgagggaggcccagcgttcctatgctcttattaagactactctttcctacccataatagaaacctcagcaggatttgaggtagacctgcaagtttcctcatgctcctagcaagaccaccactccctgcttccatgacactactcatctcacaacggatggcctgacaaggcagtcccaacaagaagtccacaactggattggagtggtgtctcatgcctataatcctagcactttgggaggccaaggcagtaggaccacttgagtcctagagtttgagactagcctgggcaacatagtagacctcatcattgcaaaaaataaacaaaattagctggacctggtggtatgcatctttagtaccagctactcaggaggagaaggtggggggattgcttgagctcgggaagttgaggctacagtgagccacgatcatgccactgcactctagcctgtctaatagagtaaaaacctgtctcacctgtcttaaaaaaaatgtccaaaattagaactgatgaccgacttatcttgaaatgaccagtagagctgatcttatcctgattcatatcaatcttcaaggaggaagaactgaccatgctccagaaagatcaagtaaaatatggacacaaaaggtctatttgagttttcagttataaggttcctggtaacattataaagaataatttctatggagttatggtgaagtaaaagaatgggaggtgaagatgtagatacagagtatagcctactctgtaggagaagctggctgtaaaatgatggaaagagaaatgaagcaactagaaaaaggtgcctagttgaaggtgaattgttgttgttgttttaatataggctagatgcttataagctaagaatctagtaacaaaggagaaattaaagataacagaaaagggataattcatcaaggaagtctagaagaagccaggaaaggatgagatcacagtacaagtgaatatattagtcttggacaggagaaatgacacagtttcttctaagatgtgtgtgagggtagcgacaggggaacaactaaagaaaagtttataagtgaggagaggaagtgaaaagagttcatgtctaatggtatttgttttttcaaaggagttaatctgctgttggtgaagggactggccagggcggggtgtgtggggcagtgtggggaagatataagatagctattgtgtgaagatggtgggctaaccatgaagaccagtatggtatttagggctcagctgacatcggagaccccttatgtgtagtggcaccaacatacaccactgtgagattttctcctccatcaacactcaactccgggacaaggcagatgtttgaactcatcctaggccagggacttgtgttgggtggatatggtggcataactaggggttgatgggtgagaatgctggtgagagagctattacagtggtttaggctgcataggaaagaaagcaagatgaagagagggctgatgacctgggagaaagtagaggccaagggactggaaggcatgagcaaaggagtgagcaatggaagaataactgtggtgagtgggatattggagttttcgatttcagatacggaatagttgtggggaatgggagattcagagtataacccctggaggaggatactaatatggtttaaaagtaagtttccatggaattgaagaggtgggcatgctccatgcatatagggtagtgtcctggagaattgccaatgatttagactgggacgagttgacagcacgagacacaaagcatgaatactaaaaaggaagagtttttgctgtaggtgggaagaatagtagcctgaagtggcactaaggagctagaaaactgtaactccttcgttttacttcatttttctcctttcttccagtttagatcctttatcatcccatttggattaaagaaatattctactaattgatttccctgattttggtctcactctaagtgtccacatacacaggacttctagcttgaccttgtagaacagtcttgacagcctttacttcactcctgctcgcaaacttcagtatctctctgtggaataaaatccaaatttcttagcctggcccttaaggttccaagcatagagatggcttcaatctactacaattgacccttggataatacagttgctaaggttgctgacccttgtgcgttgaaaatttatgtgtaacttttttttttttttgagatggagtctcgttctgttgccaggctggagtgcagtggcatgatcttggctcactgcaatgtccgcctcctgggttcaagtgattctcctgcctcagcttgccgggtagctgggactaccggcatgtgctaccacacccagctaatttttgtatttttagcagagacagggtttcaccatgttggctaggatggtctcgatctcctgaccttgtgatacacctgccttggccacccaaagtgctgggattacaagtgtgagccaccatgcccagcctatgtgtaacttttaactcctccaaaacttaattactgatagtctgctgttgaccagaagactgactgataacttaaacatcaattaacacatattgtgaatgttatctggtcctttcttatttacaaatccagacaaagagaaagctccctctgaagtaatgcattacagctggaagaaagagccctgtggctttattcttaaaataaagtaagctaggaaaagaaaatgtcattaagaaaatcataaggaaaagaaaatagatatacggttcattaagtggaagtggatcatcataaaggtcttcatccgcatcatcctcttcacactgagtaggctgagaaggaagaaaagaaggggttggccttgctatctcaggggtggcagaggcagaagagaatccacattttaataagaccggcacagttaaagctcatgttcaaaggtcaactgtactttgctttgtatatctagtttgaagcaatatcaaacattagcttgtattggtctaaactctacacttctttacctaatcttagagtactttcctgaaagtggttttgtttgctgtctggaatgcttctccactcctctgaatattcaactccatttatccttcaaggaccaaatcaaatacagattcttccctgcatcaaaggacatttcctttccctattcttcttaaaattccactttactccctatattctagttagtcctgtacctaataagaaagaaccatgcccaatttatgctcataaccccagctcataatacttcgctcattatcttgctccttgtaggtatccagtgtctgctaactaaatgcattcatacattcatgaataaataaatagagctcttataacgttgcagtcgtgttaagggtcagaatccttcactagaagataatctcgaggtttagggttgatattatattttttatcctcaatacttagcaccattctggaaacattgtaacctaagtacacagtacaataaaatcttggtaaatggaattgaattagtgtcttcacacctaagtcattctcactgtgtcaatcccaagtgctctagagagtgaacacggtctctgaaacagcaaatagctgttaatatcctgaagtgagtaaaatgctgcctcttagaactggatagcaagtctcttaacagagactatttatttattctttcattcgttgagtcataccatgaattgcaattgatctatatccaataactattatagacactaaggagaaaacaatctgtgaaaataaggaggtgaaagaatgggcttggcttcttgctgggatttaaatgccctttttcttaaggaaacaaaatgcatgcctatgttgcattttcgctctaggattttccaagggaaacccttcttctaaggacggtcatgtcacagtagaactgaaaatattccccatcagtattagacctgaaaggaaacaagatttaccaagcatggggagccttccagaaagcagacagctcatgtttataaagtaatctctcctttttctcctgtttggccaggctgtgacaacatgctgatgggcataaagtctttgaaaatagtgaagaagatgatggacacacatggctcttggatgaaagatgctgtctataactctccaaaggtgtacttattaattggatccagaaacaacactgtttgggaatttgcaaacatacgggcattcatggaggataacaccaagccagctccccggaagcaaatcctaacactttcctggcagggaacaggccaagtgatctacaaaggttttctattttttcataaccaagcaacttctaatgagataatcaaatataacctgcagaagaggactgtggaagatcgaatgctgctcccaggaggggtaggccgagcattggtttaccagcactccccctcaacttacattgacctggctgtggatgagcatgggctctgggccatccactctgggccaggcacccatagccatttggttctcacaaagattgagccgggcacactgggagtggagcattcatgggataccccatgcagaagccaggatgctgaagcctcattcctcttgtgtggggttctctatgtggtctacagtactgggggccagggccctcatcgcatcacctgcatctatgatccactgggcactatcagtgaggaggacttgcccaacttgttcttccccaagagaccaagaagtcactccatgatccattacaaccccagagataagcagctctatgcctggaatgaaggaaaccagatcatttacaaactccagacaaagagaaagctgcctctgaagtaatgcattacagctgtgagaaagagcactgtggctttggcagctgttctacaggacagtgaggctatagccccttcacaatatagtatccctctaatcacacacaggaagagtgtgtagaagtggaaatacgtatgcctcctttcccaaatgtcactgccttaggtatcttccaagagcttagatgagagcatatcatcaggaaagtttcaacaatgtccattactcccccaaacctcctggctctcaaggatgaccacattctgatacagcctacttcaagccttttgttttactgctccccagcatttactgtaactctgccatcttccctcccacaattagagttgtatgccagcccctaatattcaccactggcttttctctcccctggcctttgctgaagctcttccctctttttcaaatgtctattgatattctcccattttcactgcccaactaaaatactattaatatttctttcttttcttttcttttttttgagacaaggtctcactatgttgcccaggctggtctcaaactccagagctcaagagatcctcctgcctcagcctcctaagtacctgggattacaggcatgtgccaccacacctggcttaaaatactatttcttattgaggtttaacctctatttcccctagccctgtccttccactaagcttggtagatgtaataataaagtgaaaatattaacatttgaatatcgctttccaggtgtggagtgtttgcacatcattgaattctcgtttcacctttgtgaaacatgcacaagtctttacagctgtcattctagagtttaggtgagtaacacaattacaaagtgaaagatacagctagaaaatactacaaatcccatagtttttccattgcccaaggaagcatcaaatacgtatgtttgttcacctactcttatagtcaatgcgttcatcgtttcagcctaaaaataatagtctgtccctttagccagttttcatgtctgcacaagacctttcaataggcctttcaaatgataattcctccagaaaaccagtctaagggtgaggaccccaactctagcctcctcttgtcttgctgtcctctgtttctttctgctttaaattcaataaaagtgacactgagcaaataacctcatcaggttatatttgcccacataccctaagcacaaaagctttctgggagtgctgcttgtgttaggtttactgtgaatgattcccaacacactgaggccctggtaaatattctggaatctggacagaagccatacagcaggcaagcgactctgccacagcaggcatgccctgtggcaccgagggcagcatgcctcttgacaggggcttcctcagtgtttcccacgtgtttgtccaattcagctaagttcgagtcacaagtgcaggctgtggtgccagtctgtgtcacgtgctgaagcctctgtctttccaggttggtcacatgagaaggtttgctttgtgtgcttgcagctgttttcctgtctttgccaagcccaggctgggaccataggcagtgaagagaaaatgtttttttccatagcatttgagtagatatttggcagaagggaattactcaacccatggatacagtgtaattacccacagttctaacagaatggtacagagaggccaaatcctttgtggaatgagacaggtatgaataaataaatgtgatattacctgccctattacctacctatttcacagatagaaggaatgtgggctgcctcacagaggatagtggggtagatttatcaataggagtgagtcctgcaaccgtagttcctttggaggcacagaggggaggttgcctgaaatgtgctgtctagattccacctgggatatgatttgattgacagctctgcagggcacatctgccccaaacaactcaccttggtacctaccttaaatccctgcagctcgaatcactcttttaggtcaagacattttctccaggaagcccctgttaagggaccactttgcttcttgtgagccagcgcaggtcagtatgcaggcctgggaatggggtttctttcaggtgaacgttttagctctggggtcttgttggatttaagtgaagactgacatcgacatggcctacatcagtggttcttaaactttgttgcacataagaatcacctgcggagttttaacagtcctcatgccgtggccatatccccaagaccattaaatcagaacctctggggatggatcgagatatcagtatttttaaagttccttcccgcaagttggttccaaagtgcaaagaagctccagagccggtgacttagaacatttaaaaaggtaactgtatcaatttaagaacaggctagcagtttctgggggcggaggtaaggggagtggctccgctagggcaataaagggtgggattcggaaacagccatgaccttgtgtgaactgtggcagcctgcgtctacaaaagtcgctctgctgctattttaaggaagtgaaagagaactgaagggtgtcctgttgtaacacaactcttgcgggccccagccttcccctgctggctgtgctttggtctgctgctggccaggttcccgcagtgaccacacgtctcatatttgccagggtgggttaggttctgttcacatgtaaaattctcctgggcctactggtcatttcagaccgcgagggtaaatttggtttgaaaaagttgtgtcctgtggagtttgtcgacactccagcctgtagagaactaaaggctagggctgtggtgactcctgccagagctggggactatgccgagtccctggtgtcgctgccatctgaggcctacagggattttaaacagcttaacagcagccagtccttggaggcctgggcagggccacaacatagcagtacaaccaaaacgggttcaggccacacgctggaggtaggggctggaccagatctccagcttcagtcctccccagttcgagaacccattcctgtggtcagacattgccaacgcttttcttggacctaaggtcccagaccttggcgctgggcacagggaaatgcttcctgacctcagctcttcataagacagaacttttgtttggtgccaaccactagagggacctccaccccaggttgcgagtgcagcgcggcgggacctgggatgattcgggggctttccgacctgcttagggagggcggctcagagacaacctcaattttgcctggattgcacgcgggccgaggaagtcgggatgctccgaagggtttctgctctgggagtgcctctaatgtgggttttctatgctttctctcttcgcaattctcgacaccgtttccttcttcctcgctttcattccctgtgaccggagaacggcgctgaaggactggagaagcccaggagactgggagccggagcgccgggtacccacccgggcctccccgcaaccggagctgtgcggaggaggaggcgcggcgaacggggcggggctcccggaagggggcgcggtccgccgagagaggcggggctggggcccggacgcgcggcccagggggtggggacgaggcaggttcgaaggggcggggctgaccaggccggtcccccgggaacaggaaccctggtggacgggtcccagcaggcttcttcggtgcccgagagggagcgggtgcccaagggggtggtccctgtggcaggtcccggggtgggggcgcggcgctcccgggaagagccttccgcaggtgccccgccccgtcacgtgggcgccggccccggccgctgcggnnnnnnnnnnnnnnnnnnnnnnnnnnnnnnnnnnnnnnnnnnnnnnnnnnnnnnnnnnnnnnnnnnnnnnnnnnnnnnnnnnnnnnnnnnnnnnnnnnnnnnnnnnnnnnnnnnnnnnnnnnnnnnnnnnnnnnnnnnnnnnnnnnnnnnnnnnnnnnnnnnnnnnnnnnnnnnnnnnnnnnnnnnnnnnnnnnnnnnnnnnnnnnnnnnnnnnnnnnnnnnnnnnnnnnnnnnnnnnnnnnnnnnnnnnnnnnnnnnnnnnnnnnnnnnnnnnnnnnnnnnnnnnnnnnnnnnnnnnnnnnnnnnnnnnnnnnnnnnnnnnnnnnnnnnnnnnnnnnnnnnnnnnnnnnnnnnnnnnnnnnnnnnnnnnnnnnnnnnnnnnnnnnnnnnnnnnnnnnnnnnnnnnnnnnnnnnnnnnnnnnnnnnnnnnnnnnnnnnnnnnnnnnnnnnnnnnnnnnnnnnnnnnnnnnnnnnnnnnnnnnnnnnnnnnnnnnnnnnnnnnnnnnnnnnnnnnnnnnnnnnnnnnnnnnnnnnnnnnnnnnnnnnnnnnnnnnnnnnnnnnnnnnnnnnnnnnnnnnnnnnnnnnnnnnnnnnnnnnnnnnnnnnnnnnnnnnnnnnnnnnnnnnnnnnnnnnnnnnnnnnnnnnnnnnnnnnnnnnnnnnnnnnnnnnnnnnnnnnnnnnnnnnnnnnnnnnnnnnnnnnnnnnnnnnnnnnnnnnnnnnnnnnnnnnnnnnnnnnnnnnnnnnnnnnnnnnnnnnnnnnnnnnnnnnnnnnnnnnnnnnnnnnnnnnnnnnnnnnnnnnnnnnnnnnnnnnnnnnnnnnnnnnnnnnnnnnnnnnnnnnnnnnnnnnnnnnnnnnnnnnnnnnnnnnnnnnnnnnnnnnnnnnnnnnnnnnnnnnnnnnnnnnnnnnnnnnnnnnnnnnnnnnnnnnnnnnnnnnnnnnnnnnnnnnnnnnnnnnnnnnnnnnnnnnnnnnnnnnnnnnnnnnnnnnnnnnnnnnnnnnnnnnnnnnnnnnnnnnnnnnnnnnnnnnnnnnnnnnnnnnnnnnnnnnnnnnnnnnnnnnnnnnnnnnnnnnnnnnnnnnnnnnnnnnnnnnnnnnnnnnnnnnnnnnnnnnnnnnnnnnnnnnnnnnnnnnnnnnnnnnnnnnnnnnnnnnnnnnnnnnnnnnnnnnnnnnnnnnnnnnnnnnnnnnnnnnnnnnnnnnnnnnnnnnnnnnnnnnnnnnnnnnnnnnnnnnnnnnnnnnnnnnnnnnnnnnnnnnnnnnnnnnnnnnnnnnnnnnnnnnnnnnnnnnnnnnnnnnnnnnnnnnnnnnnnnnnnnnnnnnnnnnnnnnnnnnnnnnnnnnnnnnnnnnnnnnnnnnnnnnnnnnnnnnnnnnnnnnnnnnnnnnnnnnnnnnnnnnnnnnnnnnnnnnnnnnnnnnnnnnnnnnnnnnnnnnnnnnnnnnnnnnnnnnnnnnnnnnnnnnnnnnnnnnnnnnnnnnnnnnnnnnnnnnnnnnnnnnnnnnnnnnnnnnnnnnnnnnnnnnnnnnnnnnnnnnnnnnnnnnnnnnnnnnnnnnnnnnnnnnnnnnnnnnnnnnnnnnnnnnnnnnnnnnnnnnnnnnnnnnnnnnnnnnnnnnnnnnnnnnnnnnnnnnnnnnnnnnnnnnnnnnnnnnnnnnnnnnnnnnnnnnnnnnnnnnnnnnnnnnnnnnnnnnnnnnnnnnnnnnnnnnnnnnnnnnnnnnnnnnnnnnnnnnnnnnnnnnnnnnnnnnnnnnnnnnnnnnnnnnnnnnnnnnnnnnnnnnnnnnnnnnnnnnnnnnnnnnnnnnnnnnnnnnnnnnnnnnnnnnnnnnnnnnnnnnnnnnnnnnnnnnnnnnnnnnnnnnnnnnnnnnnnnnnnnnnnnnnnnnnnnnnnnnnnnnnnnnnnnnnnnnnnnnnnnnnnnnnnnnnnnnnnnnnnnnnnnnnnnnnnnnnnnnnnnnnnnnnnnnnnnnnnnnnnnnnnnnnnnnnnnnnnnnnnnnnnnnnnnnnnnnnnnnnnnnnnnnnnnnnnnnnnnnnnnnnnnnnnnnnnnnnnnnnnnnnnnnnnnnnnnnnnnnnnnnnnnnnnnnnnnnnnnnnnnnnnnnnnnnnnnnnnnnnnnnnnnnnnnnnnnnnnnnnnnnnnnnnnnnnnnnnnnnnnnnnnnnnnnnnnnnnnnnnnnnnnnnnnnnnnnnnnnnnnnnnnnnnnnnnnnnnnnnnnnnnnnnnnnnnnnnnnnnnnnnnnnnnnnnnnnnnnnnnnnnnnnnnnnnnnnnnnnnnnnnnnnnnnnnnnnnnnnnnnnnnnnnnnnnnnnnnnnnnnnnnnnnnnnnnnnnnnnnnnnnnnnnnnnnnnnnnnnnnnnnnnnnnnnnnnnnnnnnnnnnnnnnnnnnnnnnnnnnnnnnnnnnnnnnnnnnnnnnnnnnnnnnnnnnnnnnnnnnnnnnnnnnnnnnnnnnnnnnnnnnnnnnnnnnnnnnnnnnnnnnnnnnnnnnnnnnnnnnnnnnnnnnnnnnnnnnnnnnnnnnnnnnnnnnnnnnnnnnnnnnnnnnnnnnnnnnnnnnnnnnnnnnnnnnnnnnnnnnnnnnnnnnnnnnnnnnnnnnnnnnnnnnnnnnnnnnnnnnnnnnnnnnnnnnnnnnnnnnnnnnnnnnnnnnnnnnnnnnnnnnnnnnnnnnnnnnnnnnnnnnnnnnnnnnnnnnnnnnnnnnnnnnnnnnnnnnnnnnnnnnnnnnnnnnnnnnnnnnnnnnnnnnnnnnnnnnnnnnnnnnnnnnnnnnnnnnnnnnnnnnnnnnnnnnnnnnnnnnnnnnnnnnnnnnnnnnnnnnnnnnnnnnnnnnnnnnnnnnnnnnnnnnnnnnnnnnnnnnnnnnnnnnnnnnnnnnnnnnnnnnnnnnnnnnnnnnnnnnnnnnnnnnnnnnnnnnnnnnnnnnnnnnnnnnnnnnnnnnnnnnnnnnnnnnnnnnnnnnnnnnnnnnnnnnnnnnnnnnnnnnnnnnnnnnnnnnnnnnnnnnnnnnnnnnnnnnnnnnnnnnnnnnnnnnnnnnnnnnnnnnnnnnnnnnnnnnnnnnnnnnnnnnnnnnnnnnnnnnnnnnnnnnnnnnnnnnnnnnnnnnnnnnnnnnnnnnnnnnnnnnnnnnnnnnnnnnnnnnnnnnnnnnnnnnnnnnnnnnnnnnnnnnnnnnnnnnnnnnnnnnnnnnnnnnnnnnnnnnnnnnnnnnnnnnnnnnnnnnnnnnnnnnnnnnnnnnnnnnnnnnnnnnnnnnnnnnnnnnnnnnnnnnnnnnnnnnnnnnnnnnnnnnnnnnnnnnnnnnnnnnnnnnnnnnnnnnnnnnnnnnnnnnnnnnnnnnnnnnnnnnnnnnnnnnnnnnnnnnnnnnnnnnnnnnnnnnnnnnnnnnnnnnnnnnnnnnnnnnnnnnnnnnnnnnnnnnnnnnnnnnnnnnnnnnnnnnnnnnnnnnnnnnnnnnnnnnnnnnnnnnnnnnnnnnnnnnnnnnnnnnnnnnnnnnnnnnnnnnnnnnnnnnnnnnnnnnnnnnnnnnnnnnnnnnnnnnnnnnnnnnnnnnnnnnnnnnnnnnnnnnnnnnnnnnnnnnnnnnnnnnnnnnnnnnnnnnnnnnnnnnnnnnnnnnnnnnnnnnnnnnnnnnnnnnnnnnnnnnnnnnnnnnnnnnnnnnnnnnnnnnnnnnnnnnnnnnnnnnnnnnnnnnnnnnnnnnnnnnnnnnnnnnnnnnnnnnnnnnnnnnnnnnnnnnnnnnnnnnnnnnnnnnnnnnnnnnnnnnnnnnnnnnnnnnnnnnnnnnnnnnnnnnnnnnnnnnnnnnnnnnnnnnnnnnnnnnnnnnnnnnnnnnnnnnnnnnnnnnnnnnnnnnnnnnnnnnnnnnnnnnnnnnnnnnnnnnnnnnnnnnnnnnnnnnnnnnnnnnnnnnnnnnnnnnnnnnnnnnnnnnnnnnnnnnnnnnnnnnnnnnnnnnnnnnnnnnnnnnnnnnnnnnnnnnnnnnnnnnnnnnnnnnnnnnnnnnnnnnnnnnnnnnnnnnnnnnnnnnnnnnnnnnnnnnnnnnnnnnnnnnnnnnnnnnnnnnnnnnnnnnnnnnnnnnnnnnnnnnnnnnnnnnnnnnnnnnnnnnnnnnnnnnnnnnnnnnnnnnnnnnnnnnnnnnnnnnnnnnnnnnnnnnnnnnnnnnnnnnnnnnnnnnnnnnnnnnnnnnnnnnnnnnnnnnnnnnnnnnnnnnnnnnnnnnnnnnnnnnnnnnnnnnnnnnnnnnnnnnnnnnnnnnnnnnnnnnnnnnnnnnnnnnnnnnnnnnnnnnnnnnnnnnnnnnnnnnnnnnnnnnnnnnnnnnnnnnnnnnnnnnnnnnnnnnnnnnnnnnnnnnnnnnnnnnnnnnnnnnnnnnnnnnnnnnnnnnnnnnnnnnnnnnnnnnnnnnnnnnnnnnnnnnnnnnnnnnnnnnnnnnnnnnnnnnnnnnnnnnnnnnnnnnnnnnnnnnnnnnnnnnnnnnnnnnnnnnnnnnnnnnnnnnnnnnnnnnnnnnnnnnnnnnnnnnnnnnnnnnnnnnnnnnnnnnnnnnnnnnnnnnnnnnnnnnnnnnnnnnnnnnnnnnnnnnnnnnnnnnnnnnnnnnnnnnnnnnnnnnnnnnnnnnnnnnnnnnnnnnnnnnnnnnnnnnnnnnnnnnnnnnnnnnnnnnnnnnnnnnnnnnnnnnnnnnnnnnnnnnnnnnnnnnnnnnnnnnnnnnnnnnnnnnnnnnnnnnnnnnnnnnnnnnnnnnnnnnnnnnnnnnnnnnnnnnnnnnnnnnnnnnnnnnnnnnnnnnnnnnnnnnnnnnnnnnnnnnnnnnnnnnnnnnnnnnnnnnnnnnnnnnnnnnnnnnnnnnnnnnnnnnnnnnnnnnnnnnnnnnnnnnnnnnnnnnnnnnnnnnnnnnnnnnnnnnnnnnnnnnnnnnnnnnnnnnnnnnnnnnnnnnnnnnnnnnnnnnnnnnnnnnnnnnnnnnnnnnnnnnnnnnnnnnnnnnnnnnnnnnnnnnnnnnnnnnnnnnnnnnnnnnnnnnnnnnnnnnnnnnnnnnnnnnnnnnnnnnnnnnnnnnnnnnnnnnnnnnnnnnnnnnnnnnnnnnnnnnnnnnnnnnnnnnnnnnnnnnnnnnnnnnnnnnnnnnnnnnnnnnnnnnnnnnnnnnnnnnnnnnnnnnnnnnnnnnnnnnnnnnnnnnnnnnnnnnnnnnnnnnnnnnnnnnnnnnnnnnnnnnnnnnnnnnnnnnnnnnnnnnnnnnnnnnnnnnnnnnnnnnnnnnnnnnnnnnnnnnnnnnnnnnnnnnnnnnnnnnnnnnnnnnnnnnnnnnnnnnnnnnnnnnnnnnnnnnnnnnnnnnnnnnnnnnnnnnnnnnnnnnnnnnnnnnnnnnnnnnnnnnnnnnnnnnnnnnnnnnnnnnnnnnnnnnnnnnnnnnnnnnnnnnnnnnnnnnnnnnnnnnnnnnnnnnnnnnnnnnnnnnnnnnnnnnnnnnnnnnnnnnnnnnnnnnnnnnnnnnnnnnnnnnnnnnnnnnnnnnnnnnnnnnnnnnnnnnnnnnnnnnnnnnnnnnnnnnnnnnnnnnnnnnnnnnnnnnnnnnnnnnnnnnnnnnnnnnnnnnnnnnnnnnnnnnnnnnnnnnnnnnnnnnnnnnnnnnnnnnnnnnnnnnnnnnnnnnnnnnnnnnnnnnnnnnnnnnnnnnnnnnnnnnnnnnnnnnnnnnnnnnnnnnnnnnnnnnnnnnnnnnnnnnnnnnnnnnnnnnnnnnnnnnnnnnnnnnnnnnnnnnnnnnnnnnnnnnnnnnnnnnnnnnnnnnnnnnnnnnnnnnnnnnnnnnnnnnnnnnnnnnnnnnnnnnnnnnnnnnnnnnnnnnnnnnnnnnnnnnnnnnnnnnnnnnnnnnnnnnnnnnnnnnnnnnnnnnnnnnnnnnnnnnnnnnnnnnnnnnnnnnnnnnnnnnnnnnnnnnnnnnnnnnnnnnnnnnnnnnnnnnnnnnnnnnnnnnnnnnnnnnnnnnnnnnnnnnnnnnnnnnnnnnnnnnnnnnnnnnnnnnnnnnnnnnnnnnnnnnnnnnnnnnnnnnnnnnnnnnnnnnnnnnnnnnnnnnnnnnnnnnnnnnnnnnnnnnnnnnnnnnnnnnnnnnnnnnnnnnnnnnnnnnnnnnnnnnnnnnnnnnnnnnnnnnnnnnnnnnnnnnnnnnnnnnnnnnnnnnnnnnnnnnnnnnnnnnnnnnnnnnnnnnnnnnnnnnnnnnnnnnnnnnnnnnnnnnnnnnnnnnnnnnnnnnnnnnnnnnnnnnnnnnnnnnnnnnnnnnnnnnnnnnnnnnnnnnnnnnnnnnnnnnnnnnnnnnnnnnnnnnnnnnnnnnnnnnnnnnnnnnnnnnnnnnnnnnnnnnnnnnnnnnnnnnnnnnnnnnnnnnnnnnnnnnnnnnnnnnnnnnnnnnnnnnnnnnnnnnnnnnnnnnnnnnnnnnnnnnnnnnnnnnnnnnnnnnnnnnnnnnnnnnnnnnnnnnnnnnnnnnnnnnnnnnnnnnnnnnnnnnnnnnnnnnnnnnnnnnnnnnnnnnnnnnnnnnnnnnnnnnnnnnnnnnnnnnnnnnnnnnnnnnnnnnnnnnnnnnnnnnnnnnnnnnnnnnnnnnnnnnnnnnnnnnnnnnnnnnnnnnnnnnnnnnnnnnnnnnnnnnnnnnnnnnnnnnnnnnnnnnnnnnnnnnnnnnnnnnnnnnnnnnnnnnnnnnnnnnnnnnnnnnnnnnnnnnnnnnnnnnnnnnnnnnnnnnnnnnnnnnnnnnnnnnnnnnnnnnnnnnnnnnnnnnnnnnnnnnnnnnnnnnnnnnnnnnnnnnnnnnnnnnnnnnnnnnnnnnnnnnnnnnnnnnnnnnnnnnnnnnnnnnnnnnnnnnnnnnnnnnnnnnnnnnnnnnnnnnnnnnnnnnnnnnnnnnnnnnnnnnnnnnnnnnnnnnnnnnnnnnnnnnnnnnnnnnnnnnnnnnnnnnnnnnnnnnnnnnnnnnnnnnnnnnnnnnnnnnnnnnnnnnnnnnnnnnnnnnnnnnnnnnnnnnnnnnnnnnnnnnnnnnnnnnnnnnnnnnnnnnnnnnnnnnnnnnnnnnnnnnnnnnnnnnnnnnnnnnnnnnnnnnnnnnnnnnnnnnnnnnnnnnnnnnnnnnnnnnnnnnnnnnnnnnnnnnnnnnnnnnnnnnnnnnnnnnnnnnnnnnnnnnnnnnnnnnnnnnnnnnnnnnnnnnnnnnnnnnnnnnnnnnnnnnnnnnnnnnnnnnnnnnnnnnnnnnnnnnnnnnnnnnnnnnnnnnnnnnnnnnnnnnnnnnnnnnnnnnnnnnnnnnnnnnnnnnnnnnnnnnnnnnnnnnnnnnnnnnnnnnnnnnnnnnnnnnnnnnnnnnnnnnnnnnnnnnnnnnnnnnnnnnnnnnnnnnnnnnnnnnnnnnnnnnnnnnnnnnnnnnnnnnnnnnnnnnnnnnnnnnnnnnnnnnnnnnnnnnnnnnnnnnnnnnnnnnnnnnnnnnnnnnnnnnnnnnnnnnnnnnnnnnnnnnnnnnnnnnnnnnnnnnnnnnnnnnnnnnnnnnnnnnnnnnnnnnnnnnnnnnnnnnnnnnnnnnnnnnnnnnnnnnnnnnnnnnnnnnnnnnnnnnnnnnnnnnnnnnnnnnnnnnnnnnnnnnnnnnnnnnnnnnnnnnnnnnnnnnnnnnnnnnnnnnnnnnnnnnnnnnnnnnnnnnnnnnnnnnnnnnnnnnnnnnnnnnnnnnnnnnnnnnnnnnnnnnnnnnnnnnnnnnnnnnnnnnnnnnnnnnnnnnnnnnnnnnnnnnnnnnnnnnnnnnnnnnnnnnnnnnnnnnnnnnnnnnnnnnnnnnnnnnnnnnnnnnnnnnnnnnnnnnnnnnnnnnnnnnnnnnnnnnnnnnnnnnnnnnnnnnnnnnnnnnnnnnnnnnnnnnnnnnnnnnnnnnnnnnnnnnnnnnnnnnnnnnnnnnnnnnnnnnnnnnnnnnnnnnnnnnnnnnnnnnnnnnnnnnnnnnnnnnnnnnnnnnnnnnnnnnnnnnnnnnnnnnnnnnnnnnnnnnnnnnnnnnnnnnnnnnnnnnnnnnnnnnnnnnnnnnnnnnnnnnnnnnnnnnnnnnnnnnnnnnnnnnnnnnnnnnnnnnnnnnnnnnnnnnnnnnnnnnnnnnnnnnnnnnnnnnnnnnnnnnnnnnnnnnnnnnnnnnnnnnnnnnnnnnnnnnnnnnnnnnnnnnnnnnnnnnnnnnnnnnnnnnnnnnnnnnnnnnnnnnnnnnnnnnnnnnnnnnnnnnnnnnnnnnnnnnnnnnnnnnnnnnnnnnnnnnnnnnnnnnnnnnnnnnnnnnnnnnnnnnnnnnnnnnnnnnnnnnnnnnnnnnnnnnnnnnnnnnnnnnnnnnnnnnnnnnnnnnnnnnnnnnnnnnnnnnnnnnnnnnnnnnnnnnnnnnnnnnnnnnnnnnnnnnnnnnnnnnnnnnnnnnnnnnnnnnnnnnnnnnnnnnnnnnnnnnnnnnnnnnnnnnnnnnnnnnnnnnnnnnnnnnnnnnnnnnnnnnnnnnnnnnnnnnnnnnnnnnnnnnnnnnnnnnnnnnnnnnnnnnnnnnnnnnnnnnnnnnnnnnnnnnnnnnnnnnnnnnnnnnnnnnnnnnnnnnnnnnnnnnnnnnnnnnnnnnnnnnnnnnnnnnnnnnnnnnnnnnnnnnnnnnnnnnnnnnnnnnnnnnnnnnnnnnnnnnnnnnnnnnnnnnnnnnnnnnnnnnnnnnnnnnnnnnnnnnnnnnnnnnnnnnnnnnnnnnnnnnnnnnnnnnnnnnnnnnnnnnnnnnnnnnnnnnnnnnnnnnnnnnnnnnnnnnnnnnnnnnnnnnnnnnnnnnnnnnnnnnnnnnnnnnnnnnnnnnnnnnnnnnnnnnnnnnnnnnnnnnnnnnnnnnnnnnnnnnnnnnnnnnnnnnnnnnnnnnnnnnnnnnnnnnnnnnnnnnnnnnnnnnnnnnnnnnnnnnnnnnnnnnnnnnnnnnnnnnnnnnnnnnnnnnnnnnnnnnnnnnnnnnnnnnnnnnnnnnnnnnnnnnnnnnnnnnnnnnnnnnnnnnnnnnnnnnnnnnnnnnnnnnnnnnnnnnnnnnnnnnnnnnnnnnnnnnnnnnnnnnnnnnnnnnnnnnnnnnnnnnnnnnnnnnnnnnnnnnnnnnnnnnnnnnnnnnnnnnnnnnnnnnnnnnnnnnnnnnnnnnnnnnnnnnnnnnnnnnnnnnnnnnnnnnnnnnnnnnnnnnnnnnnnnnnnnnnnnnnnnnnnnnnnnnnnnnnnnnnnnnnnnnnnnnnnnnnnnnnnnnnnnnnnnnnnnnnnnnnnnnnnnnnnnnnnnnnnnnnnnnnnnnnnnnnnnnnnnnnnnnnnnnnnnnnnnnnnnnnnnnnnnnnnnnnnnnnnnnnnnnnnnnnnnnnnnnnnnnnnnnnnnnnnnnnnnnnnnnnnnnnnnnnnnnnnnnnnnnnnnnnnnnnnnnnnnnnnnnnnnnnnnnnnnnnnnnnnnnnnnnnnnnnnnnnnnnnnnnnnnnnnnnnnnnnnnnnnnnnnnnnnnnnnnnnnnnnnnnnnnnnnnnnnnnnnnnnnnnnnnnnnnnnnnnnnnnnnnnnnnnnnnnnnnnnnnnnnnnnnnnnnnnnnnnnnnnnnnnnnnnnnnnnnnnnnnnnnnnnnnnnnnnnnnnnnnnnnnnnnnnnnnnnnnnnnnnnnnnnnnnnnnnnnnnnnnnnnnnnnnnnnnnnnnnnnnnnnnnnnnnnnnnnnnnnnnnnnnnnnnnnnnnnnnnnnnnnnnnnnnnnnnnnnnnnnnnnnnnnnnnnnnnnnnnnnnnnnnnnnnnnnnnnnnnnnnnnnnnnnnnnnnnnnnnnnnnnnnnnnnnnnnnnnnnnnnnnnnnnnnnnnnnnnnnnnnnnnnnnnnnnnnnnnnnnnnnnnnnnnnnnnnnnnnnnnnnnnnnnnnnnnnnnnnnnnnnnnnnnnnnnnnnnnnnnnnnnnnnnnnnnnnnnnnnnnnnnnnnnnnnnnnnnnnnnnnnnnnnnnnnnnnnnnnnnnnnnnnnnnnnnnnnnnnnnnnnnnnnnnnnnnnnnnnnnnnnnnnnnnnnnnnnnnnnnnnnnnnnnnnnnnnnnnnnnnnnnnnnnnnnnnnnnnnnnnnnnnnnnnnnnnnnnnnnnnnnnnnnnnnnnnnnnnnnnnnnnnnnnnnnnnnnnnnnnnnnnnnnnnnnnnnnnnnnnnnnnnnnnnnnnnnnnnnnnnnnnnnnnnnnnnnnnnnnnnnnnnnnnnnnnnnnnnnnnnnnnnnnnnnnnnnnnnnnnnnnnnnnnnnnnnnnnnnnnnnnnnnnnnnnnnnnnnnnnnnnnnnnnnnnnnnnnnnnnnnnnnnnnnnnnnnnnnnnnnnnnnnnnnnnnnnnnnnnnnnnnnnnnnnnnnnnnnnnnnnnnnnnnnnnnnnnnnnnnnnnnnnnnnnnnnnnnnnnnnnnnnnnnnnnnnnnnnnnnnnnnnnnnnnnnnnnnnnnnnnnnnnnnnnnnnnnnnnnnnnnnnnnnnnnnnnnnnnnnnnnnnnnnnnnnnnnnnnnnnnnnnnnnnnnnnnnnnnnnnnnnnnnnnnnnnnnnnnnnnnnnnnnnnnnnnnnnnnnnnnnnnnnnnnnnnnnnnnnnnnnnnnnnnnnnnnnnnnnnnnnnnnnnnnnnnnnnnnnnnnnnnnnnnnnnnnnnnnnnnnnnnnnnnnnnnnnnnnnnnnnnnnnnnnnnnnnnnnnnnnnnnnnnnnnnnnnnnnnnnnnnnnnnnnnnnnnnnnnnnnnnnnnnnnnnnnnnnnnnnnnnnnnnnnnnnnnnnnnnnnnnnnnnnnnnnnnnnnnnnnnnnnnnnnnnnnnnnnnnnnnnnnnnnnnnnnnnnnnnnnnnnnnnnnnnnnnnnnnnnnnnnnnnnnnnnnnnnnnnnnnnnnnnnnnnnnnnnnnnnnnnnnnnnnnnnnnnnnnnnnnnnnnnnnnnnnnnnnnnnnnnnnnnnnnnnnnnnnnnnnnnnnnnnnnnnnnnnnnnnnnnnnnnnnnnnnnnnnnnnnatgtcctcctggatcactcccttctatacctaccataccctaggaagtctgactgtctgcaccttgggccatagagtgagcaaggttccatccctgggaggggaggcaaggaaaggatgtgggtaccagggcctcattcaagtaggctgaggttttgggtggggtgtggtgtatgggaggagagagttgctgtggttaggcaacgtggatgtctgagcagtgtgatatcttggtctgggtggcagggaaggagtctggcaagaatggtaggaagagtggccatggaaccccaaggtcagaactggcccattggatctgaggaaacctaccctttagcagcagaggtagagcatacttctcaggtactgtggaatcagtaggattgtgacagtatttattatttcagcctctaaataatttttgaaccattgtctatgctgagaatggtgatgatgggaccacaagatgaacagacatgtcccctgactgaatggaacttaagaaatgtacccccttactgaaacagatagtagtaactgctgagaaaatacagttaatattcagagaaagatgttgggggggcctggcttgctgaggaggtggcatttgaggtgtgtcctgaaggaaagacagggaccagagttgcccgtttctatggggctgaagggaattgctggcagagggaacagcagtgcacaaaggaaggcatgagtaatgccaattaaggggcacctgtggaaaacaactggcggcatgatttggctggaactgaagagtaaacgaagttaaatagggcaccagggattggaaattaccgtctatgaagtacccatcatgcatcaggcattgagcacagagtctgtgctcacttaaatttcaaagcagcctttcagggctttaactgaggaggaaatgggcttcaagaagatacctgatcatctcaagtttccctaggtggtgagtggccaaaataaaattgatgtccaggctgcctgaccccaaactctgttctttccacttaatcttgccactatgtttagagtccagattatgcagtcttaaatttacagtgaagacctgttcttaccgtatttaggcaggaagatggtcagatggcacatggcaaaccacattaacctttgagaggcacttagtggacatggccagatagtcacaaagcatatctgagttctaatacatatatatgcatgcatacacatatatatttaggaagttaatctctaacttcctaaatgcagttttcacattacaatagaaactgttactcccagaccactataggcaatttctgaattgctggctgaattccagtattttctcatcccttcaataaagtatattagaatggggcaagataagcctgaatcttctctaatttatacaaaaagcttctatcattagtaacaagttacctacaaccaaccttacctgtttaggataccaaggtgtcagccctaagagatgtttagcaagagtggtactccaagaggtttggaagcgtgggatgagggtaagagtcagagaaatgtgggcagtaacccaggtggggctgtaggggttgagaggagggaccgatacagttcagtaagcatttgctgagagcctgcccatgcaggggtgtagagtgggtgctgggatacctgcatgaaaggacaacattgttttcacagatcacatgttcaagctctgagcaggtgggtgttggtgaggactgcctgctcaagttggggttcttatgcgtatatctagtacagtcagccagtctttgttgctgagcaggtctgcccagggcccagttctccatccagtttggccttcctcctggagctcagaactcagatctagccctggtggccacgccttgcttctgtcctcagggtggacccagggtccttcagacttcctaatgggaggcttttcctcagcctggagagaaaagttgagaccacctgcgaggcaatagtaaccactgagaagacagaggaaatattcagaggaagaagttgggggagcatctgggctgcagtgacgcaggatttcatgttaacaggagacaatgtgggaggaagctctacctccttgtcctaccacttaataaggtacactgtgagaacccgttaaaggctcttccagggtcacaaatccagtcctcaaatgttatgatttatatttaaaagagaattttagataagccaagtgacagctgaatgggaaatggagttaatgagacagatcttatcggctccatgaaaaatgcatctcattacatcactgttacacatcgtatatggaaaccttccctcagtaattcctggagtgattgcctgtctggctatcggtgtccccaaagagtgtggtgtccactgagaataaccgggaggcctttctcagataccagtacggctcagccatcttctctcaaggccatctctagagttattacgggctctcttgatgccagtgcatggagccagggactgctgcaccgaggacaaagccagccagccatgaacgtggtcaagacttggcccttcccctccctaaccctacagagcccagttcagctttagcctccatgtttgaggcctcccaaaatccatttccccagcggtgtcttctctgtcaggtacctgcccctgggatggcccctgagcctcataactcggcctgttcactgttcctaagcaggtcaccttgtgaccctcgtggaatggctgaggaaggaaccgaggggctgtaagagtggccgtgtgatccctaggaaaccttcagctctggaaggccctgtggccctaaccttgccctgttttgtcaggtactgctagagagacgcagaaaacctggagcatgtgtgactgtttgagctgctgtatcccagggtctgccactttgggggctacctgcaagagatttggcaacttctcaaaggaactcaacatcatggttgttgtttttttaaccctgatcccaacatttaggccctgatgaagggtcttggccaaatccatcttctggaatagtacagttgggaacatgttctctgatgtggagaggcagagtgttacatacttactgggccaggcactgaggtgggtagtttattctgtcctctttcttaaccctctgactaaccctgtgtaaggcagatattatatccattacatagtaacctgagaggttaatgtccatattacccaaggcaaaaggcaaaaaacgaatccagctcataagtagtggagcaaggatttaagcccaaatctgtctgactttgctatggtctgaatgtttatgtctcctaaaaattcatatgttgcaatataatccccaaagtgatggtattaggaggtggggccttgggaggtgattaggtcatgagagtggagccctcatgcttgagattggttcctttataaagaggccccagagaactagctggtttcttccaccatgtgaggacatagctggaaggcaccatctgtgaaccaagaagcaatcctgctccagacactgactctgctggtgccttgatcctgggcttcccagcctccatagctgtgagaaatacatttccattgtttgtgagctaccttcccaatttatggtaattttgttaaaacagcctggacagactaagacaaagcttgggctctttctgctgcatgctgctcctctctttcttcaggggaagaagcacctcacttgggaagaaaggagcctcagaaggcttgaggctgggggtatggggacccagcgtctatactaccccttctgtggccatttggagtcacatagacctctgtaattttcactttttcctttgattctgaggaactgtttgggtatcttctataggggaataaagactctgctttatggaaaggaagagctgagaaagatgggagagaggtcccaggagatcattagaccttcccactcccctggagtccagctaacaaacttccaggagcaaaaccacttgggcctgcagggaaggggctacctagtacagtgtcattctccagcaggcctgtctttggcctgcaggaacacttgtgcaagtgggggattcctagatcacttttcttgggaaagtccctaaaccactttctggcctctgaactcttaggggagggaagtgatccaagtggcaaatatcttgtgactggcaagccaaggttagggaccaacccttcccctgcctccccacatgctggagcttttgaactgagttgaagatagctgggcccagggctcttggcccttgaatgcagcttgacatctggtcaggctgcaggatcttagggtttcctctttgtagcatcctaaaatctggcctcactaaatggtctcggtccagaggtgggattcgacttagagctgacttacaaagaatacagataaaggaatattgggaactgtgcttaccttgatgtggtttaaggtctgaggatgtgaagaaagtctctcctggattaagagggaaggggaacaccagtgggtcaggatagaggccgacagccctggagaggaggctgccttcttcccataactttcccagctgcgtgtgtaggatcaaatgggggtgtgtgttagtttgcttgggctgccataacaaagtactggggggcttacacaagagaaatttattttctcacaattatggaggccagaactctaagatcagggtgttggcagggttggtttcttttggggcctctccttgacttttatttattttttattaattttttttttctttttggagatggagtctcactgtgttgcccatgctggagcgcagtggcacgatcttggctcacagcatcctccacctcctgggttcaagtgaatctcctgcttcaacctcctgaggagctgggattataggcatgtactaccacacttggctagtttttgtgtgtgtgtttttagtagagatggggtttcaccatgttgtccaggctggtcttgaactcttggcctcaagtgatccactcacctcggcctcccaaagtgctgggattataggcattagccaccatgcccagcctctccttgacttttagatggctgtcttctccctttgtcttcacatggtctttcctctgtacccatgtgtcctaatctgctctgcttttaagtacaccacctattggattagggcccaccctaattatctcattggaatgtaattacctctttcaagaccttatttccaaatatagtcacattctgaggtactgggggttaggacttcaacataagaattttgagggtgtgggtacaattcagctcataacagggtgtttccaaaatcctcattgaacaaggctcagtgtcatggtgaagcatggagaggcacttactactgatcctgccaaccttgggaccaggagaggatggtggacccagctagctagtggaggaagcctgactggcctcgtccaaaggctcagctccaggccgagctgtttacttgtagtcaggctctctggcagcagtagtttctgtgcagtgtcttcatctggctcccgtgtggccctcggaactccagtgaacacagagctgctaataccctccagcccaggccttcgggggaagcctccttctcctctgatggaggcagaggccaggctgttgttgacagtgcacacaggcctgtctttaaagaaattctttggtcttctactgacttaactttttttattgcaaggggaaaagcattgcattgaatcaaaattaaactgttcaacaaatgttgaaatgaaggctcaaattacagaatacattttgattaattcaattagtgtttacctccagcctgccaaattctggggcctattcctcagcaggcagccagggaggctcgtaggagggagttggctataggcaaaagttacgcacgctccagctaatagagaaaacttaccaattcatatctgttttttttttttgttgttgcttagcattctaaaataatggaatagggagaagtgcctggttttattatctattaggggaagtgacatccttttttctcattggtccttcaggaatacaattgcatccatcagttatgtctctcactcatgccaggcccaagcgtaagttccccttatggtagagacgctttcacctctgaatatctggctgtaagagagaagggaccccaggtgtggagaaagttcgatgagagaggctgtcatggatagcccccaatccttctttcagagtgctggccaaggttacatgcccagcctcccttcactttccactcaggtacacaaacacttaacattttgtgtcaacaaacatttactgaaggtcctgtgccaggttctttgctgggctctgaggatagaaaggtgaatggagcatactccttgctctctagcagttaatctagacagggaggcagacacattgagaaataatacaaattattatcatcttcataaataatatagacagctctgacgataaaggtgtgtaccagatatgacaggagcagagctgaggcatccagcaccttcagggatgaggggtaatggtgttaggaaaggttttctggcagtggtcatttggataaggccttagcatgggtgggatttgaaagtagagatggagaaaagcacccacgtagaggaagtacagaaaatggggtatttctgtatgcgagggtaggacgtggtccagtgaagctggaactcagagtggtgaggactatagcggggaaggttaactgtattagaggactttggcagagctgcaaaatgcagcttctctcctgaaagcactgtgaagccgaggaatgtttgagagcagaggagcatgtcatgagctccatggaacatgtcttgcctgcacagggaaagaaagacagattgcagggaagttggctagaggtagaaagcccagaggaagcagcttttgcaatctggctgagagatgatgaggttctaaactgtggtgaggtgagaggtaaggagagtttggtggaatgttaggacctattcagggagtttgaatggcactgtagaaagagcaccaaatgagtcatcaggaacttaggttcaaatctcagttctgctggaagggaaagtagaattctctgccccctgccctgaaaagtccacatccccaggtggtggtttggttttttgtgttagcctgttactataaaaagaattcaaatgtacacagaaatagaaatagtaaaatgcatcctcttacccatcatttagcttaacctcttgcttgtattattttttaggggggcaatttttgagatgaagctttttggaaatattcactttgaggttgcatttgaagcatttctctgaatctgtttatgatctggttgaggcaatgaaataatttcacgtccatttgttcctccctggaggtaaattgtgtgtatgcatgtgtgttctttgctgtaagaaggaaaatgagggtagcttcccttgaagggtaagttctggggctgaggaggcacattgccaaccgggtcctgtcaggggcatgaggctctctgtctgctgtgggggcaggtgtggtgtggacaggggagagaatggaggtaaggactaccacaggtcagacacccttatccattcactgggaggggcttgttgcccagagcttaattcacactgaccaacctgacaaggctggtccataagccagacaccaatttaatttactctggcaggcattgtgcagtggccacaacgcaaatgcctgctttcccagaccgccttcctggccttaccccacctggcaaaatgaattacagcatcatccgcaggttgctggggagccatgctctcaaatagaaggcaccatgtgcattgcaggtgcatcactacaggccctgatgggacctcataggctctttctggtgcaggccacttcctttgccaaggtggctctagggagaggggaggatgggctgagctgcacatgctcagttccttctttcatttccaccatcagatactgagctgtttcccaggggaggaaatcctggaaagagaggaagttagtatcctcccattgggtcttgcccatgacaacatgaagcagaaactaaatggaggtgggagcccatgtctcagccaagattcatttcaacaggcaggggtggggatgctgtcatagagaaaacttgcctgagcattgaaaaattagttttgatggacagagattggggaaggggcctttagttgaggaaacagcatgacaaaggcacggtggcataaggatgctctcttgcggctggggtatcaggaacccaggagcaggtcaggctcagtgaggaagtgcgtccagcgtagtggttaggaacataaccttggagttggactgcctgaattcaaatcttatctttactgcttcctggatgtgtgatttgaccaagtcacttaacctctccaagcttcagtttccttatctgtagaatcgggataataatagttataaatattgagatatgagataaacataagaacttagctcagtgtagaagtgagtgtttaataaatggcagccattataactaccatcatgagaacaggacattttcgggccggctccaatttggatgccagctcatgcgttcagactgctgtgggagaggccaggtgttactcaggtgagaggaggttctccagtgccctggttctgaatacctgaacacagtctgggcagtaggagtggaaaggatgagatggagaagagcatccctgcaaggggagaccacagagacctggtggctcacacgggaggggagtagggtggggaagcatgacaggtgaatgcaggctgcatagttcaatgagggacccggagagcgcttctcccaaatgccagaggaggagagtgtcaccactgatgagatgccaaagaaggcactagagcaaacgctgactgatggcgagtctaagcgctttactctgttaacatttaaccttcacaaccaccctttcaggtaggcagttttattattatcctcatcttaaagatgagaaacccgaggcacagaggttaagtgtcttgccctgggacatatagtttctgaatcagggctgtcaccgaggcagtccaaccccagcctgggcttttaaccccaccctagaccgcctcttaaggaaatgggaacacaagcggctggctggatgagagcatggcacgggtgcacacggatgagtgacgtcccaccactgggggtgtcagagagcacgggaggtaggcagtggggctctgaggcaaaggggaaacatggaataataacagtagggtgcagggtcaaaggacatgttctagaatagcagaggaaggagcagaagagggagagagtgcagattcagtttggagggggaataattgagaggttggatctcagtgatgatcgaagattaggggtcacagggaggaggggcaactcttagacagcatgtgaagagagggtaagagatgagagaaggggaatcaagtggttttgtttctcattaaagaaagatgcatggtagtttgcagagggagtctgacacgaagaaacatgagattagagatcccaggcgcatgaatgtctgatggagccgtatgtgttgtgtagcatcccgggagcagaaggaagaagagacatgtgaacctggttccccaggcagagggagagtgagcgtaagttgtgaccagagaggtagaatgagctgaggagcacgttcaagctggagagaggtgaggactctacactctgatgaacagagccagggagagagcctccacgttgtccagaatagggctatggtgaaagaggaaatggagtcaaggaagtgtgggaagggagggaataggtggggacctgaagtgggcaggtagaagggacaggctggcagaccatggttatacttggggaggggaatccagagagatccttgagctccttgagaaggatccttccttcaggtccccgcctcctcctcctacgttattgctgggaagagtgggtggcttctaggtggctccctcagtggttgtcattgcctaatggctacaggccatgttctaggggtgacaggtgagagacccttctcaagctggggcagcttcattcgctgtcactattcccctgctctctggccactgagctacatctttgtaaaacagggctgataattgtactatatccctcacaggacccccttgaagattaaatgagaaaacaaaaatgaggacactttttttcccccccacagaggcagcagcttctcaaaggagacaggaaacctgtgaactcccagagcaggtggtttttacacacaggtggatattgcacaggctcgaaataattcaccatcatcttgatctattgtgaatggctgtgtggccagggcaggcagccaaatcttagaacgtgtgagttatctgttgcctagtcctggctcttcacatcttagccttgaaagatagactctcatttacgtttacttcttagacccactctttctgagcggttcagaaggaagggaaagagcctcctctccgaaagttctctaagtggctacggtgggccctatccccatgagggcactgatatacttgtcttacagtattgaagggcacactgatggggtttggtgatgctctgctccctggatgctgtctggctccccatctcaattcttcccaaaggcacagatccctgcctcgcttccctgccctccccgctccccactccccaatccctctccttgttggagtacctgcactgtttgacctttggcatctccccaaaccattctctgacagacctggcattaaggcatggccttggtgtggttgtggctggtttaccctaatcagtgcttgagttgggaaaaggatcagcttggagagagaggggaacaaaggcagaatatcgagagcagaaataggtgagaagagtcagaggagggtgaagcgagcattcaacaacatcaagcaaatacggtgaaggaaacttgacatcagcttcttagtgttcctgaagcccagaaggtcagatgtgcttttgggtgtgagccatcagaacctcagactcacacccgtttcctggccagaccctgcgctcctccttgtgggctgggctcgtggtgtctcattctcatgtctttggggtggtgtttctcttaaaaagcttgccatttccagtaggaggaggatgtcgctgctgagactgtgggacagctaggctcagagggagtctgacttcggggcacccggaggtgaggtctcagtgcctgttgctgctctttgccttctttagaggacagtgtgcagctttctgactgaatgccctgctgttgtgatatgttgctggaaatgctgtttggggtcatggagccttgcttaaagggctgtggtttggtgagaagggctcgagctttttgggaatgcttaagtggaagcatctgggcttggctctgccaaaggaggctggtggtggagcagggacatgtgacaggacttgggctgtgtcttcagtggaaggaccagaaagcaaaaggaatccttccagtgggttcagcagaactaggctccagcacaaatgttcttaaggatatcctggacctcgcctgacagggagtggctgggaatacccggtgcataaaactcactaacctggtatagcgggaaaaagacgctaagcaagaaatattgcattcatcccctgccaccacccagcactgccagcctgtgtctagattcagggccctttctgcagttctgatagatctcagcccccactggcctgagcttaactgactaatcagaacagcctgatctaggatgtttaggttgaaacaaggaaccttgtatgcgccaaatatttttgttgctgtaaagctttgaacaaatgtttgctcttaggagttactgatactatgattagatggggaccagttaagcatgcttgttcaccttcagtggcattcttctattttctcctcttcagcttcttttaggctacttaagcttctattcattgacaaaacaaaacaaagctctgcctcttcacttttattagactccgatattcactgaaggcattcagcaactctgatagcaacgttctcagcagcctggcccctctgtcctgctatggctcctctttgtcctgacaggatatctcgctgtgttgggctcctctgtcctgagggaaatttagcacaatggccttgtccctcattgtgatataaagccagtgtctgtgggctctgccattgctctgaggagctgtcttcgcaggccaggtgtgcggcttctcctctccactgtcagatctgatcctgtgggggtcgtgacctctggatgttataggacctgtggaggacaggtacagcttgtggccctgggcagaaggtggggacaacttgaactgctacgctgagagccttgccagtgtagaccggtgacctctttatttcctttcattttctcccttttagaatgggagctgagctccggggtcagagatatggccctgcctgtgagggccttaccacttagacaaaagtgccctggagaagtctgtcctgggagtggcgagggggacccagtcagaagtagtcacttccatctgggggatggatgggagaggatccttggagataatgatgatggaatttggcctcaaaacaggagtgggagttgagcaggtagaacgaaggacttcagctaaaacactgaagaagccccaaaagcagaagcaagctggggacaatagcttggctgttgctcagggcaggagccagatatggccaggagaattaaaactgctggggttgtgaactcccacccagttttgaatctctacagtcccacaatgtgtctcttttcacctgaattttataaataggtaaaatgaggttcattaatgttaaagagcttgtcaggggcacagctcatgaaggaaagaacttggatctacatgcaggtctgactacagaacccactctcctaactgctctgtgggtccttaacttcgtctccaggtccccaagcacccctttgttgcctgagtgatagaaagctggtgaagcgttgtgaatgctgggaagccttggtaagatttgtgaaatagacccaccctcctggcagcagtgtggaggatgaggggtgtgggggggcggtgaggctggaggcagagaaactggttaggaagccagtgcagccactctgatgggagatgacggcagggcaggtgaagatgaggggacagatctgaaagagagggaggagattttaccggatctggtgcccagttggatgtgggtaacaaaagggaaggtccaaggctgactcccaggtttttatcttggtgaccatgggggcatcaccaaggtgggatgggaagcatttgggtcccacccattgtgagaatatagagagggaggtgggtgctcaggatgggaagagtttggggctgttgtaggggaacatgctgcaacctcactccagtccccactatctcccaggctttagcttcccatggacaatgaattggttattttatcaataaatctgtaaacacttatccagtgcttacagaatgggggaccccacagggacccagacacgtggcacagttttcagggagatggctgtgcacagctgctgtcattcctttccttcaggatgaaaaaagatgatcagggagatcccatttaggtagtcagaattaagtatgattacctggaagagctggcttgatgggaatttagcagggacagctgtaggcatgggcataaaagctggaaagcagtgcagacagccaattaactaacaattaggatcagatgccttagtgataaggcatctggtgaggatggggcagaggtctgccaaaaggtatgtatggtaaaagttaaagccgtgaccaagtaggttgagtccatatgatgatagaccatgatttctactgtgtggctggtggccagcccctgaggctgtctaagcaaaagggtgcctggtgcagggctgtgtttgcattccatcagttcctcaactttggtcagaatcagaatcacccgaatggctagatcagccataaaggtcaggctctctacttacaggaggctgggcctcttgcttgattagttctcagggtggttctgattaacagcaaagtttgaggaccacgagataggtgaatcttcagtgcagagtgaatggggagggctgttcggaggagggtaaccggttaggaggctattgtagtcatctagggtgaggtaatacagggacaggtgaggctgtgtgagcagatgagatcaccagtagcgtgagtttggagagaagtgctctggtcttattcagcagcatttggtgcacctgactgcgccctctatccagaaaccctttggttcgcttatgggtgccactctcacttctggctgctcctcctgtctcctttgtccattcctcttctccccggtggctgcatggtggagtgtttcagggagtcctggggcttcctctgtttttataccacttcttaagtcacttcatgcaattgcttaaatacatctttatgaagatgcctcccaaattgacatctccatcccagacttctctgtaaacatcagactcctatttccaaatggctactcagcgtaacttcctaggtgtctctaggcctcttaagctgaacatttctaaaaccaatctcctgatttcacccccagacaccccacattgttgctcctgcaggcctccacattctctaggtactcagggcaaaaaccgtgtaggcacacttgactctgctctctcatgcccatgtccagtttatcagtaaatcttatgggctttgtccccaaggtatatcaggaattagaacatctaattcattacggtctgagtcacttcatctcttgccgggtttcctgtgttcactgctgcgtcccctgcagtctattttccaagaagcagccagagtaatccttttaaaaggttaagtcagatcatgtcaactctatcctcagaaccctccaaatgggtttctgtctcaggaaagtggaagaacaggaggaaaaatggtgtgcatcctcaggcaaattgcctaatctgttttctcatctgtaacagggggagaataattcctaactggtatggggattaagtgaaataatgttggataaacccttagcaaatagctaacagttatctgcccaatatatggtaactaaagaggagacagatgccgcattaatttaatcttggcactgtgcctgccatgccacatgtattatttcttttaatcttttttatttcttttaatcttaatcaccactatatatccacacaatttaaagactcaaataattgtatgtaatttgttaaaacagccacctcttcacctccccaccccattgttcttcctcagatgcagctgcttaatttttttagtcatgtatttttatccgtatctctagaaaaatgcttgttctgctgctttattattttccccccatttgtcattatctgttcttattgaattaaacaaagtcttcaccaattatgtaagtctgttaagatgttcagatgcaccaggtgttctgtcaatttcatatgactgaggaagtctctcccagagcttttgaactggctgaccttgcaggcttgctacagaactgtaccctagcatctcccttatggccatgaccttgtgtccttttgagtttatgtctctcttgttaaatgagcagttaaattaaatgtttaggttcagcctgcaatgtttacctgagttctgtcttgtttacatttgcccaaaacaatgaaattgattttatactgattttacagatgagacaattgaggctaaaagaggttaaaagactcacagccattatgcagcagagcccatgttttcactcaagtctgtctgtatataaaagctgtactctctctcctttgccctttaggaagaaagtagttgttggttaatatgggatgtgattgagaatttagcgctgccatcaaattccttcatatctgtctttgtcctttttatttttggatgctccaaatggcttcttgctccactctaccaaagaggtttcttagatcctttaaagaggctttctcttaagcttagggatagcaaaaggtatttcttaaaataaccatttaagagcagctatggcttatgggaggcctgtaaattattgggaaaagactccaatttcttgtaatatagtgacacttctttatcatctgtttgccacttggggaagggagaggtaggaaaggagttaggttctgtggttgtggtggggttcttggctgaggcctccttccccaggccttgatttccaggcagagacactggcccctgtctagtggcagctgctaaggagtcaggtcttggctctggctcaactgtgtccaaggctcagaatatcctggaggcacagggaatagcagtgacttccagatctgttcctagttcatttcagcatccagggctatgtgagcctgctccaaacatcaattacaacctaaccatttttattgagagaaaagaagcttagaaatggaattcagcgtgggtggagtaaacaaaggtttacttgcttccgacttaccttcatcagtggttgctgcctacttcaaattttcttttgccaaacatgaaaggagttaacacagtatataaatcactgtttgcctcagaacataccagatgatggggttcaattgtgactcactttctaaattttagaacacatacagatcttgctccctaatcaacttccaggtgccaaactggcctttgtgtggtgcagttcatgtggctgtggcatgtcatcataccttgccattctaaaacatggcttttcctcactggctgcatttacagctaaggggtgtgggatcgttttctccctcactggtagcgaagagaagggttaagtcctgtaatgagcaggacccccagcctcagatgctgtcccagataggaagatgacagcacacacataggcctgtgagtgaaggaaggatgaattgtggatggactgcattttttcttaaacaacataccctgccttatctttatggccagggatgagacagtgtctcagtatcagaagccagcctgctcattagggtcaaaatgccagctatgttaagtgtccagagagaatgaaaagtgctttggtcccatgtaacaactgtctctgtattgtgtgtgctaagagcaatatccttctctgtgtccacttctttctttcctgggcggttgggtgcccctcgtacagtccccatggcacattgttgattcctctgttgtccatgctgtgtaaggcccttgggtagctgctgtagctctcctctcattgctggggagcatgatttaaattctacatcccggttcacgcctgtattcccagcactttgggaggccaaggtgggtggatcacgaggtcaggagatcgagaccatcctggctaacacggtgaaaccccatctctactaaaaatacagaaaattagccaggcgtggtggcgggcacctgtagtcctagctactcgggaggctgagtgaggagaatggcatgaacccgggaggcggaggttgcagtgagctgagattgcaccactgcactccagcctgggcaacagggtgagactccatctaaaaaaaaaaaaaaaaaaaaaaaaaatctacttcccaccatctgcttagctgtcaccctgatttttcacatgtcgcttgggattttggcttgggttctggctctctctgtcttctccctggtgtgttgcttctggagcttggtgcacttaagccccatatccctgaggagccctggctccctaggagatgctgtgtccctgtgggaggaaccgatgtggaagacactgaacgcactgcatgtcatcagacagcatgtttacctctgagacctgtgatactatgatatacagtagccccctcttacccatggttttgctttcctgggattcagttacccaaggtaccgtccagtaaggtattttgaaagagacagggccaggcatggtggctcacgcctgtaatcccagcactttgggaggccgaggtgggtagatcacttgaggccaggagttcaagaccagcctggccaacatggtgaaatcctgtcttctacccaaaatacaaaaattagctgggcgtggtggtacacacccataatcccagctgcttaggaggatgaggcacaagaatcgcttgagcctggaaggtgcaggttgcagtgagccgagatcatgccactgtactctagcctaggtgacagagtgagaccctgtctcaaacaaaaacaaaaacaaaacaaaacaaaaaatcacattcacataatgtttttacagtgtattataattgttctatgttattactaattattgttaatctcttactgtgccgtgcctaatttataaattaaacttcatcagaggtctgtagatacaggaaacatcgtattctatatatagggcttggtaccatccactgtttcaggcattcactggggctcttggagcgtgtcctccaaggataaggggggactactataataaaaaaagtatatatttggtctccttccagtttgctagcacagaaaaggggcaacttttgttattcataataagcgcctttcaaccttactcagctttatgctaatgaggccactcctgcaggatgggctggttaccagagaaaccaacctggtgattagagggttagaactttcagccccactcccaatcctcccgactcctacctcggggaggagagtggggctgaagcttgagttcaatcaccaaggactgagcgacccatgattggattaatcatatctatggaatggaacttctataagaaaccctaaatgaaggaaggggtttggagaacttccaggttggtgaacgcgtggaagtgctgctgggtagcagccctggagaggctatggaagctccatgcatccctccccactcctcagtcccttgccctatgtatctcttccatttggctgcttctgtgttgtcagaaactacacatcagctcctaggattcttatgaaagcacattgtatgataatggatttaagtggttttgtggtcttgtatgcatatgtggaaccctctgtaatgtttccttgttttgtatttgaattttcaggaagaggaaaataggctggcaaaaagagtcatggcttctgatgctagtcatgcactgtgaataggatacaccttgaatcatgtttcacttcaggccagctcccacaggtccacccagcttgctgtttgccaagtacaaactcatcgctgggcagagggcccatgggtcttgttttatggcccttctgttgcgggggcacatagcctgggccctctgggtttgacaccctgtcatgtttacatctgaggccacctgatttgttaggcattggcatccaggcccctgatgctgtgggtgtgattcccaggctcctctcatgcattgcccttgtactgcatatgtgaattccatggaaggctttgactcatcttgagcagctgggtgctcctgcgtaatctcatcaaccattttggcctttgccaactacatcctgcccttacatgcttccctggctttcctgtgcaccacactctctgcctggaacagcattctcctcctcatcttctgagaaagcttctatcatccttcaagacccagggaacttgcacacctgcctctatcaacataccttgcactgtgtcataattatttgttcatacttccgtctcttccactagattgtgtggttcatgggggcagatactaggtctgatttatcagtatccttctagggcctagcacaatgctggctgcatggatctgtccatttattcataagtatctatctgttacacagtgggaacctgggagtaaacaaggcagacagggtccctctgcctctgtgggaaggtggccagttagcaaggaaacaaatacatagaacaagatactgtggatttgttgtgctttgaaggggctgctttacgtggtgccggggggcggtgtggggaagccctctctgatactttggatctgagacctgaaggatgagaataaatcagctgtgcagacaactaggaagtgagctcagggtagggggatggcaggcgtattgcagaggagggaaggtcttggagggctcgggagcagacaggagaccagtgctgctgaagcatgagccatgtggggagagatgtgagcatggcctggcctgatcctgaaacctgcttcataggccacagtaaggagtttggaattttccccttagagaaagagcagtgggaaggatttggagggattatttcaaacttttaatatcccttatgctgaacaggtgagagtctgcagattgtttccttcctcctgcttccccccttttccctgctacctcttcttttatcctggccaaagctggcctccattcaggccccaggatttccacaccgtattcgctctgtagcggcctggctgctcctctcacctcggagcagctctgttccttgttgcagccttttctggctcctgccagggccctgaggtgccactgaagttccccgacaccctgtgagctcccattctcattccctctaagctaactgtgcagtggttcttgacccccgaggctgaatgcctgcttctgaaccttccttggccttagcacctgtaaatccctgccctctccccctccacaagcatggttgcttatcttccttccccatgcctgccgcctccaaacgaaccagcctcctgagtttatctggttctccctccctgcacctacctatttttgtttaaagtttcctctgagctggcaaaaatatgtcctgatgttatatcctcacttaaaaaaaaagctaacatattgaacactttgtgcaaaggaatgtgcttagtgctctctacataattttaatcatgacatctatgagttagatgctgttatccccattttacagatgaggaaactgaggctcagagatcacacagtacatagcagagctgggtctgaactcaagctatctgactttggagcctgtggatttaactattatttcctagtgcagtccagtgtggttccttggtcttgagatccttatccacaccatctctgaagccattcctgggtggtgcccattttcctgtcttcactctaaatgtcccacttcacaggaaaaactggcggagagcctcagaaccacctgtttcctctgctgcaccatgcttgagtgtggaagccgtgcccctgttctccacagcgtgtatggccattcggcacatgtgtagatttgctgaatgagcaaacagcaactcctccagtttacagacgtgagctaattctcttgggattacaagtgctattgtaaatccctccttgctacccagggagagggtggggaacaagaaaaatgagaggaggctgcaggaagagggtttaaactaaagaccttccttgaggtagagttgtccagagatggaagcaattgcctgagggacaggggaggggcattgggcagttcccctttgctatagctaggggatacagcattaaggtagtggccggactgtgtatccttggaggtgttcatctgccctgaaaagatgggattctgaacctcaaatcgtgctgggtagagtggatctaagatggtcagttatggtgctcctgggtgctgtctctacatccttgtggcctgtagacttcctaggcagtgcaccctttcccaattggaggagtggaagtggcatttgagccctctcagcctggctcacacccacccaaggaaagcactgcaggcctagggcaaatgcagatgtaagacagttaaatgcctgcagggattgtcccaggccctgcccttgtgctgcattgccttgtacgccctgacagtgtccctgttaggtgtgctgctctcctacgccacttagtggcgcctttcacagtggggtcggagcttctggaacctgggactccaattgttacacctggtgaggtgttaacaattgccgtcttgctgccacaggtgactctggagagccctggtggtttttcattacagaagtgaatgggattgtgtgctaaagattcatggaaaaagcactcatgccaagagggaaaaggccatggagatgcagaaactacatgtcggctactatgattcttatgaaaacacgttgtgtgatgatggaatgaaagatttttgcgatcttgtgtgcgtaacatggaactctctgtaatttttcctttgttctgtatttgaattttcagtaagaagaggaggaggccaggcaggcaaaaggagtcatggcttctgatgctagtcatgcgctggaagctgccctggagcaaatggacgggatcattgcaggtacgcccagggaaccccagcaaccaaggtctcatcctccacattccaggaactgcttctctccttttacttttttttttttttttggcatagagaaaatccccttttgttatatttatttttcagtagtgttattgtgtatgtaatctcttttttttctttgatacgaacttatacaactctctgatgtctggtgtgatcattctggtctctgctgagacagtgtggatgtacctaccatgtaccgtctcagtttggattctggctgtgaggcagtttgggttcagtgagactgattctaatgtaaaattttcagagcttttcatggcttattatagctgatctgaaacttgaaatctagcagactttgccacctaatgcaggtgtcagcgtcctcagatggtctccagtgtgtttcagagatgaaaggcagttttgtattgattcaattaatgattcaaattttctttatgccatattgttttttatccctctcaactgtttggttttaatatttgcattagccagtaggggactttttcttagaaaagatctagcaaagctgtggttaatttgaaaggactatcaattagctgttccagctgattcctttcttcatgggagcaaccagaagcctatattgattagaccaaacgttttgttggaaatctttccagaaggtcctaagtcttctgactttacctgatacacttcagtggcctcattggtagattggatgtgcttctttggaactttgctcttcattgtttgagctgtggctggaagagagcgtggaggaaggtattgggccaagtgtggctagaccccaggaagtacacagagtacctgacactgccctttctcaggcatttgcttttccttcccattggagggtttcatctgacttacagagggctcttggtgtttgagcctgaagtgggagagtatgcctgtgtcttgcagcttcttcaggttattgttggtaatgtgatgtattctagctatcatctgtctgcttctcaatttctcagttgatagagggcccttgagaagccatgactaatgtcctgcttttcagagaatccatagactgggatgtcgtgatgtttaatactgagtgtcaacttgattgaattgaaggatgcagcaaagtattgatcccgggtgtgtctgtgagagtgttgccaaaggagattaacatttgagtcagtggactggggaaggcagactcacccttaatctgggtaggcaccatctaataagctgccaactaatataaaacaggcagaaaaacatgaaaagtctagactagcttagcctcccagcctacatccttctcccgtgctggatgcttcctgcccccaaacatcagacttcaagttcttcagctttaggactcagactggcttccctgctcctcagtttgcagacggcctattgtgggaccttgtggtcgtgtgagttaatagtacttaataaactcccctttatatctatatctatagatatagatatctatagatatctatctcctattagttctgtccctctggaatacagatgtcctgttctaggttagggtctctgatgccttattgaggagaaagagtcaagaaagtggatttcctagcaatccttttagagatactgacctgtgagctcctcggggtctcacgtgcattgggataatagctacaggatcattcccctgagaatgcctgaggcagtcatcacttcagagccttcagccaaagagcaaaggggagactgagcgagtccctggcagacctctttgatggttgtcagggagggatgaaaatactatcttttctctacgtattatctctgctgctttgtcaaaggtcatttgattatatttttgtgatatatattcaggtctatttctgaactctgtattctgtttcatggatttattttttctttcaccaataccacactgtgttgattactgtagctttagtaagtcttgaagttgggtactgtcagtcctccaactttgttcttcagtgttgtgttggctaccttttgcctcttcgtataaaatttagagtcagttttttgatcacaaagtaactttctgggattttgattgcaattgcatttaacttagatcatgttgggaagaactgacactttcacaatattgaatttttgagagatgaatcagacttctaaagaaaagtagccttgtgtggggtcagtacctctttctgactcctgatttctccatacaggcattcctgaaatgacagagcctctggcaaaattcattttgtctctgagagacattatgtggctggatccttaaggccttgccttgacccaggatctgcagttgagaatctgggatgtgtgtggagagaggggccctaagtgtgggttgtgtgaaacccaggagacctaatcttctgatcttccagtacaaactgctctatccttccatttccttagtcctccatcttggaaggttctatctagaagggctcctgggcttttctgtctggaacaggtatgagagttttgtagagagaaggcattctttgcaaattggttctttgcagattggtagggaggaatacctgtagccagactacttgtttgaaaacctagctctacaacaagttacttacatggtctgtgcctcagtttcctcatattagaaatgagaatagtaatacccatcttagagagttgcctgtgttgacatgcgtaaggtgcttagaacagtgcctggcacatagtaagcactataaaatgttagctcttgatagattaatgagggactaaaaataatcttcatcatgttgaatcttttctggggacggggtagtattctatttattaaagctcttatttctcccatctgagttttgtggttttcattgtataaggcttgtgcatccattgctggatttgcccagggtctgcagatttaatacgtggtcttctgattgctctctgcatctgttcttgctcccttatagactgtttcccacagagctgtagagtaaacctgaaaatgtaaattaagtcatatcactcctctctccaaaactcctcaatggcttcccatctcaggataaagtttaaagcccttaccacggccagcaaggtcttagcatggcttggctttcgtggccctttatgcatcccttttacgttcccagggtgtatctcactttaaccatgagcttgcccccccctctcctggaatgccctcctccagatctaggcttatgctgaaatgttaccgtaccggaaggccttccctgactgtgtctatcatgcattcccacataactctgttcttgtatcttgtttatacttctttatagcacttatcacctgacctatcacattcatatttgcctctttgtttattgtctgcctcctgcaccagcatgtaagtttcttaaggacagaggctctgccactgtatctccagtgccataattggtggttttaggcattttagttaataagcatttaatacatgctagatgtttttttttcatttgcttttgtgactaggatctccttttcattggttaggaggtatacatataggtttctgtatacatcttctatctggctgcatactgaacttcatttattttctctattttcacccttgtttcactgattcttttggaataacaaattattattattttttttgaagactagtagtttgtatgtcccatgaaccatccctgaagtagtaactggctcacacagatatttgacaggagctatttgacagattattcaacactgaggttactagtgagtatctggagggcatgttttctatgctattcttgataaaaagaatgatcattcttttgaatgccttgttcaggttactttttctcaagattgctgaggacacttttcctcatttttatgatggcattaggatggctgaaccaaattgggccaaagaggttaagaatttttgtggttattaacatggactacagagttggactgtaggggtttgaatcccagctcagccatttagtgctggctgtgggatctttggacaaattgcttaattcttctgagcctcaatttacttatcgataaaatagcagtaataatagtacctgtctcatattattgtgagggttgaattaatgcagataaggcacctagaaagtgcttaattgatgtaagttatttgttttattgatattagtattaaattatttttaccccccaagatcatagtgctgagatttgattccagggccatctgagtctcttccaggctccttttattcctgggctggtttttatgttgatgcatggggctgtctgtaggagaaaagaattaactgagggaaggatacttttctgctcttgctcacaatccctaagccagagtggttttgttcttgtctctcttacgttatttcttctaagcaagggttcctttgcttaagggtggcacagctaaagaagtttgaaaactggcaccacaccacagatcttgcagaaatgacatttttgtgtgaacatttaaatcttcctctctttatttatgttctcttattaattttagattgcatgatgtcaagtagtgccaccaccactgccaaaacacaactgcttttccatcaaagtactcaagtacccaaagaatgtattttctcacagttaccacgtatttcaacggaaaaaacctttatgggcttcctggacctcccaaatagtaaccacttacacagaaacaacacagattcctactaaaatggatgtactgtattcagtgatcactagtaatcatatactatgtaacaaggaattgcctcttactaattacagtaggctgggttactgtttactttccaaaactccttctaaaaagagtgcactttgggcatgtgatatcaatgtttatgtaattaagcttttagtgcaaaaaaaagtctgtctcctcctgcatcaactaaaacagtgcaaacagtgcgggatgattatcactcctgtaaacaatcagaccaggagtactctgagaggacatcctaatgcgcaagtggtaaatatgcccctccagagccacggtgcgatggcctttgtctcaggtggtcaatgttgggaggtgtgagagagagaaattggttcttgtaaatgcaaaaagaaatgccttgtaagcaggactattaaatgaaactccttgtaaagttgaattcttgaaatctgaatggctgaatcccaggtgactagactagactagactagactagactagattgggtctatactagattgggacctcagtattttatatcagaaagttgggaaagggtggctgttaaagactctaggatctttgtcaataatgacttggttctaatatgaaagaccattattatagtttccagtaggatgttaacctttgatctagtcttcctcctgattagtccctgtgattctgcttgcaaattcactgtaattgaattacactgttgacaattgaaattgaactctatattgcttaattacctccctctggatggcctagagcaactgccacagacactaattttgcatggagcttaatttgtgaactgacaggttcagtggctactttgtcaggccacttctggcaggggaccagagagccacgtggtcaggacacagaaggccacttactcctcttggctctgcatgaggttactcatgcagttatgtacaagcagtactcactgaggaggaatagttaagaggagtctgttttatgacagttaaagaagttgccctgtcagctggggcctttctgccaactctgattagcgtctgggtttgtaaaaagaaaacaacaaaagattgtgcaggggcagagaaagttctgatcaagaccgagattgttcacgttggcttgtgaatgaagtcagctgtggtgctgaggactgttgagtccatactctgaacagtccttgactgatcttgtccccggcttctctgaggtgcagcagcatatagcattcatcagtatcggactcgctgtttcccattgcaggttgtgagagccctgctaggactttgttcagaagagttggagtgggggtcttaggagtgtctaaggggcagagctatcaaagactgccctttgtatgaagaggtcaaaacagctactggggcacccgctgtttgacagccctcattccatttttccctcactggtagaccccatctcccagtcctttatggaactgtgcctcgttttccattctctgaaagagtttggataaggctggaactatgtgttccttaaatatttgctatagttgtaggtataggaactgagctgcaaaactgtgtgggcctcgtgtattcttgtttgaagatttttttcttttaatggtgtggacaggttttaattttttaattgagtcttggcaagttaagtttttctagaaatgtgtccattttactgaggctttccattttgttatcatcaagttggccattatattttatctaaagtactttgttagattagaattattctttaatgtttgatagaattaacatataaaagcatttggcctggtgtgttctgtgtggaaaaaaatttaaactacgattaaatttctttataagacggccaggtgcagtggctaacgcttgtaatcccagcactttgggaggccgaggcgggcgaatcacgaggtcaggagattgagaccatcctggctaacacagtgaaaccccgtctctactaaaagtacaaaaaattagccgggtgtggtggcgggcacttgtagtcccagctactcgggaggctgaggcaggagaatggcatgaacccaggaggtggagcttgcaatgatcgtgccactgcactccagcctgggtgacagagccagactctgtctcaaaaaataaaataaataatacttgactcttagaatgctttaattctcatcactgccccatcttccacattattttcgttcagtattctagtatctttgtattctccaaattattgttttttcagttgatagcattttgtttaacagttttaacaacctctccagtcatagttgattctttcatcctgctttttttgcatgatagttttcttccttaaaatttgatagtctgtcagtaatagattgtattagtcgtcatttgaaaaatgtccttaaatgttcataatcttgaatgatagtttatcttgtacaggcttgtaggttggtcactatccataggtattattttgtggtcacagggatttattgctaatgagaagtctggcaatctgtatctgtcttctgtctctggttgtttttaaacttcttatttatctttggtgttcttcagtttcactgtgttgtttcttgggtggatttgttttgatgtatcattcttgggactcagtgagtgtctttaagctgagaggactcaagttttccattctgaaaaattcatagccattttctttgttgtctctgcttcatcctctgtattcttctggaattcctgaagaattgtgttggaccttgtcctccttttttaattccatgcttcctaactcctcttttatatttttcacttgtgtctctgtttgcagcattcttcaaatctatcttcctctccaataattctctcatctgctatttaacctgttcacttaattaatttgcttggctgcattctttattttggtttgtattttttttttcagattttcctattttttaaaatcatgctttccttttctttaaggtttttatttcttccttttctcctttaattatgtaaaacatatgacatatgcccaaatattcccaaatagacaaaatatttactcatattagtgtattgatttagttacgtgtttaagcactaagtaaaaggctttcaataattcaaaataatatgttaatttatgaacttcttgtctcattggcactttttttttttttttttttgagacagagtcttgctctgttgcccaggctggagtacagtggcataatcttggctcactgaaacctccatctcctgggttcaagcaattctcagcctcctgagtaattgggattacaggtgcccaccaccattcccatcactggcacatctgatgaaataattttattcaagctttttatatttatctttgtttctatcattttgagcgctctttttgaataatcctagcattctagagcagttgtagagcatttggggatgcagattcatatttgtaggtctgggatgggatccgagactgtatttctaatgaactctcaggttttgctattgctactcctgtggacccctcttttaagtggcaaggttttagaacatgccatccttacttggaatttgttttaaatacaacactttaaaaattcacatatgatgctgtcatcagctatttcatctcatgccaaagaactccatttacgtggtaaaaggttagactttaaaagtttatcttgtctatatgtcttaattgtacaaaatatatattttgcacgaatgaagataggctaagttatattgcagtgagaaactactcaaatgtcagtagtttgaaacacaaaggtttatttcttgtacacattgcaagttccctgagatctgccaagagctctggtccttgtcatcttcacttgaacacagactgattgagtctccactattgccagaagtcagggcaggtggaagagatatgaggaattgtgtactggctcttagactttctcccacagtgatacacatagtttctgtttattggccaaaggaagttatgtgaccatgagtgacttcaagggacagaactgtgagcctactatgaatgcaagtagaggagaacaaaatatctgaacaaccccagtcactaccacagacatccctatgtgctttcgaaagcgatcattaaaaggctttcagctggctgcggtggctcacgcctatatcccagcactttgggaggctgaggcaggcagatcacgaggtcaggagttcgagaccagcctgggcaatatggcaaaaccccgtctctactaaaaaaatacaaaaattagccaggcgtggtggtgcgtgcctgtactcccacctactcgggaggctgaggcaggagaattgctggaacctgggaggcggaggttgcagtgagctgagatcacgccactgcactccagcctgggtaacagagcaactctgtctcaaaaaaaaaaaaagaaagaaaaaaaggctttcaatgaaatcctataacacttgcattgtatgtggtcttatcctcaaaaataattattaaatcttcattaaattttggttttgctccttaaaataaaaattctcaggtgacctctataaccatcaaagctagacttcattgaggtgatctgctagtgccatggtttcagcttaagcatcattttagtatcacctgggaaactttttattaccccaggtcacacctcagaccaattaaattagaatccctggaggagggcccaggcatctggagtttgtaaaaccgctcaggtgacttcaatgtgcattgaaagttgaaaatatttgtgctactctaaatactgctttgttgctcaaaatgaaataaatagaatgccccaaagagaaactttaggcttgactgtaagttgaattacccttttctgagaaatctggggggcaaatcttgccttatatttaggcatatccagcattagtggtttatggtgtcttctaaattttcctgttaatcccaggttttagggcacacattttttttatttgttttctattttgatttgtttcccactgtggttgtaatttttttacaggaggtaattgtgggaaatgtgtgtggagtgtggaaatgagcctcctgggagattttgcaattgctaatgctgggctttaggtgttgcactattctggaccattttgtgtgcatgtgtgttgatttctggtttgggatttcggtagtcagtgcatagtagaaatttggcactataccagtggtatgcagaggcctgtaggcttgatgtctcactagggggtgagggagggtgtatatgtgtggtattataaacacctagggggttacttagcatactgcaagcttccctgccgttgggtgaattttctcagatccatttatgaaataggcaatactttggggtactttctttctataggggtctcactttcaacttactgctttcactggaggcattaaaacctcaagccccaatctcggttcctccctgtatctgggtattttgcccctgggctactctagagtcagcttgaattaatttcactgttgagttcactctttgtttctggtacccaaggtttttactgtctttcaagcttggctccatgttaaaaaataaaataaaataagagtgttatctttttcagcttttctgtttgttcattgtgggtaagggggactcctggcagttgagtatgtcctgtttccagaaggttcccccttaagcagcacatggctagcttaccaagaggcctgctctgagattttctgaaatgattgttctgtgaaaatactaccaggtttttccccctttcactaatgcaattatagagcgagggaaagctaatcaacagcacaaggaagaaacctgtctgggtttactcacttaatttcctgcccaaataaaggcctgaattcttccatattgtctagcatcctgtggggactttgaaagaacaagagaacctagagtccctgtgcaaactaaatgtcaaacttgaatctctcacttagagtcaacaaatttaaagtttaaaacaaattgttataaaagtaatgaaaattaatattgtcaacatttgggtatttctctgtatatatatataccatatacatataattgttttactgaataaggcaagtatttccccatgttactgagtctttagataattgttttttatacagctatatgaatcatattctttctttcagaagttatttaaacattcaccaatttggggggatttttcccctactttttaaaaattaagatgctgctgagattattcttatatattaatctttgactacgtgtctggttatatttccttagcttaactttctagaattggacttgctaggtcaaaaggcatgaatatttttcctgtatcttgccaaattgcttttcagaaagattaggccagtctttgtgtctattaacagtgtatgagggtacccttatgaacagcatatgagcttgccaacattaattatcattgcatttgcattttcaacaatttacgtaggtgaaaattgaatatcatttttaaatgttctatttaccaatgcaaaaacattttctttccatatttttaaattttacttctgttttttaattccagaactgcccatataagaaccttgtgcctattttgtgtgtgagaagtggcttggggactttttcttattgatagataaggtctctttttgtatgaaggctatactgagcttttgttgtaattgatacgagtaggtttgtttgtttgttttgagacagagttttgttcttgttgcccaggctggagtgcaatggcacaatctcagctcactgcaacctctgcctcccaggttcaagcgatttttctgcctcagccttaagtagctggggttacaggggcctgccaccatgcttggctaatttttgtatttttagtagagaaggggtttcgccatgttggccaggccggtctcgaactcctgacctcgggtggtctgcctgcctcggcctcccaaagtactaggattacaggcgtgagccaccatgcctggcctacaagtaggtttttcaggctataatttgtcttttaattttgtttttaatattccagaagttaattttatgtagtcaggtttattgttcttttatgtcttgctcaattgctcttgtgcctataaaatcttcctctcactcagttttgacctatcttctctttgtatttctagttcagttttttaagtgtgtaatctttgtctgtctaaattttatttttgtgtatggtgtataataaagatcttatttttttctgtgagggtaattctagccacatattttagcagtgtatggcaagtgcctcttgattgtacttctcagaatattctcagctatttttattggttagttattttactgtgtaacataaattaccccaaacataacatcatacaataataaacatttatcatctgtttctatctgccaggaattcaggagcggtttagttgggtggttctggcttaggtctcttaaagagttatagttaagatattagctggggctacagtcatctgaaggcttttctggggctggagcagcagtccctaacctttttggcaccagggaacagttttgtcgaagacagtttttccatggacctggggagtcgggggaaagtttcaggatgaaactgttctacctcagatcaccaggcatttgttagattctgataaggagtgagcaacctagatccctcgcatgcacagttcacaatagggttcacacacctatgagaatctaacgccaccagtgatctgacaggaggcggagctcaggcgtaatgctcattggcccactgctcacctcctgctgtgcagcccagttcctaacaggccatggactggtaccagtctgtggctagggctgggaacacctgggctggaggatcccttccacagtggctcactcatatggccattggtagaagggcttagttccttgatgtctgctgacaggtagccatatttcctcactatatggacttttccatagggatgattgagtgtccttataacatggcagcagccttcccccagagtgagtggcctgatacaataaagcagaaggagtcacagtgctctttataacctagccttggaagtgacattcctgtcatatcctatcatttctgtcatattctactggtgacacagagcaaccgtgatataatatccacaaattacgaatattaagaggaatgggtcactgacggcttcttggaggctggttatcaaactcttcctctgagaggaaatttagaattgtatctccctttgtatagatgtttattcaatatcattttgtcatttacatcccaaagccccatggtggcatctggaagtttcttcttcccttagttttctgccctgtaaccttatctgattcttaaatttaaagtcaagtggcgtttgtcatctgaggcttttctgtcactgtcattacaactagctcagggacaaaatatttatcttttcacttccctcatctagtatttattgactattggttttgttaaagtaataaaagaaatataagtttcaaagaaatagaaattaaagttttatatatatatatatatatatatatatatatatatatatatatatatacacgcacacacacatatgcctgtaaaacttggcacagatatacatgtactcacatacatgtacacacgcatactctgaatagtaggaaagaatcccaaagctttagggcagagagggtcacagagaaaggaagagacttttccaaggccacacagtgatataaagttaatgaaaacccagatcttccatccaccttttagcctgactcactcttcccacatttatgaaatacttaaactggatggctacgtgtttaaaattcatgtgtacagaatggagagggattacttagcaatggtttggagattggaggtcttgctctgcttctgtccgttttcttccctgaagtttggctgtggctgttctaagtccactcttaattggatttgtaggagccagaaagtgctgagcacacatcacagtggtgggtaattgggcagtttcctggctccccagagcctctgacttgtttgtggatggtgatccatgattccctgtatcatgcattttcagaaagcaaactggcaatcaaatggtaattgtttccatctgtgtggatttctgcctggcaaggaggaggttggctctgagaagagtaaagggacctggaattggatgtcaggcctgcagcataccatggatgcggtggccccaagctcacattttccagtagagtcctaatttcaaatctttcatctggttggccttataaataatgcaaatgccctagaaattccaccacctaaaccatattttctaaagtgtttcttactgctgaaaggagcacagacttcctttgttagactgttgccccagttttgatttgaaaaatgtatcactgaacttacggaaaggagacttttgctgctgctgctgttgttaaataggtgtaagaatggtggaacaggccaggcgcagtggctcacgcctgtaatcccagcactttggtaggccaatttgggtggatcatgaggtcaggagattgagaccatcctggctaacacagtgaaaccccatctctactaaaaaatacaaaaaattagccaggcgtggtggcgggcacctgcagtcccagctactcgggaggctgaggcaggagaatggcatgaacctgggaggcggagcttgcagtgagccgagattgcaccactgcactccagcctgggtgacagagcaagactccgtctcaaaaaaaaaaaaagaatagtggaacagttgaatttggggcatatcaaattagaaagagctgacccaatataccagatctctgaggacattgaagcactctctctctagatactcattcaggtatatgtgcgggcattttgtcagattccttttcagtgtctactgggtagagtgcatgatgctgggaactcagttaaatgtaatatggactctctctcagactccacagcccacaataaggagatgaggtatggatatacataataataatgcaaatttaagagcatatagagatatataggggatataaagatcttctaactgggaagatccagaaagattccagttcactaaaccctcaccaaaatgaatacagtaattgtcatctagtgctgtgggataagccaacccaaacatagtggcttaaaactaccatcgtttctttgtaatttcatgatttgagtagcactctgcaggtgtgtctcctccctgttccacttggtgtcagtcggggtggctcatgggggcttggaagatcccagatggcttcattcacatgtctgtcaccacagctgggagggccaagaaaggtggggctgtctttctagccaggtaactgggctttgttacatggcagtttagggtcaaagagagaaagagtggaacctgttagacctcttaaggcccaggcccagagctggtacagagtcacttccactgctttctgttgatcagagaaagtcaccaggccagcccagagtcaagatccatccctttatcagaggagtggaatgcacacacaggaatggaagaatctctggtggccaactgtgtaatctatgactttaatataaagaaaaaaattctaaaagctgaagaatgagatcttactgtctaaacgtagtttatggtccctagtgaggactggctgtgctttcccagttgtctaagtgtgtgagcttcatacatcagtcccaaagggtacagtcatccacctctgtatgcctatttttacactgtccagcccgagattagataaagatgatttctggaaagtttacattgtgagtgattcagctggggtccaggtggccttccaggtttctttatttaaagatggggtctcactctgttgcccaggctggagagtagtgactattcgcaagccagatattgtgcactacagcctggaactcctagactcaagtgatcctcccgcttcagcctcccaagtagctgagactacaggcgtgcaccgccatgcccagctcacccccagcttcttatctgtccctttcaccgtttcttcaccacctttgctctttactagtaccttgctcatggtgtccacccttcttactgagttttcacctctctctcattgcaggcactaaaacaggtgcagatcttagtgatggtacttgtgagcctggactggcttccccggcctcctacatgaaccccttcccggtgctccatctcatcgaggacttgaggctggccttggagatgctggagcttcctcaggagagagcagccctcctgagccagatccctggcccaacagctgcctacataaaggaatggtttgaagagagcttggtgagtagtcccgtggcctgattgggaaccactggggaatgtaatggtgcagcccatggagtgccactgctgactggggctgttgagtcatctgtataccttccagccttttcttccatcccactttggccaacgctgcagggtggcccttcttatcaaggagtatagagcccagtcaagcgacttaagctatgccctctgcccttccatggtccacagttggcctctcctgaggaaatccagggccagagaagggcaaacatttaagatttcacacacacacacacaccctcgaattacatgtactgcttattgagttctaatccctggctggtgtctctaccctcggctagatcccactaccccttgtttcttaccacaaacaaaagactggttacctcattgatttaaaaaaaagcttgacaaatttcttaggaggcaatgttttcttatttttgcatttctttggtaaaaaggctaaacttttgaaaattagtttattcgtattcctctgtatggtctctaaacttttgattctatatcctgtatctggacaaagaatgcatttcccatatacatattcacatgcagcattttatttttgagacagggtcttgctctgtcacccaggctggagtgcagtgtggcttgatcatggctcactgcagcctcgacctcccaggctcaagggaattctcccaactcttgctcccagaagtgtaccacctctgcagaagtgcgagccacacctggctaattaaaaaaaaaattttgtgtgtgtggagatggggtttccctatgttgtccaggttggtcttgaaatcttggctcaaacaatccacccacctcggcctcccaaaagtgctaggattataagcgtgagccactgcacctggccagtatttcactaatatacctaaattataaaaataccacaaaacagaattttaaagttttttatttgtacaaattgtggggtacatgtgaaatttccttacatgtatataacacatagtgatcaagtcagtcagggtatttagggtatccactgttcaccaaaatagagttttaaaggataggttaaaaaatagttcccatatttttccctgtacacccagaaatcaccttgagcctcttggatgcacctctcccactctagtctattcgtagtctatgctgttgttttctattaggattttagtgtttttcttatctatttgaatgaccttttattagccgtttgctttatttgtagcatatattttcctcactctgtttttaaataacgtttaggtgctttctgagacacagaattttaaacaactgtacttgactctatcagtctttcctattttggtttcttgttttccttttggccctagcaacgcctttcccaacctcagaacagataactgttcacctgtatcttcctctagtaagtttatggtttgatttttattttatggttaactccaatccatcaacaatattttttagcatttggtataaacaatgaatctaacttttaaaacagtttttggaaatttattaaaaatatttttgatccaaaggcagttgacattgttgttggttttttcaagatgcattggtagaaaacagcttgcattcagatttgcagttttgtcttggggttatttacaatggtttagggaatgccttcctttgaagagatttccctaaaagtgattgcattcataaatcttctagagtaattatggccatcactaacctatgcatggcgaagcaagtacttttagggggtcagaagttcatataaacattccaagttgtaagggctgcatgttaaggtttttattctggacagagatagcctgtctgtgttttagatcttgcagacctaaagtcattttatgatcagcacatccacattccacacaaggtcttaatctgtatgggaatagaattcagactggtgagcaaactcatcaagtgctttagattgacacttttagttagaagttgttgctgctcaaattttggtctgtggctcagcagctttcttatcccctcgtagcttgtgaaaaatgcagactatgggctcccatctcacacttgctgaaccatctccaggtgactcgtaagcacattaaagtttaagaagcgctgcgttcaaccctggagactcagttgaattatttttttaaagtcccatgtgggttaggattggagttggaactagtaagatggtttgaaggattaggcagcactgcccagcgccttctcatgcatgatgtctgtgcatcccttgcatatttgctcccttctcctctgtagacacattggcattgttcacacctagaattcctgcttggccatgacactggcctgacatggtccaactctgcctcgtgacacctatatcagttgggatactttttccagtaaaatgatgtaaacaataacaagatagaccactaacaagatgtccagaagacagacagtcccagggttaaataagtggctctgagtgacctcatgggtactggttcttcccatcttttttctttgccatcctcaaggggtggtttttgctcaggcacatcccataacagttgcaagatggccactagaactgcaggcaacatgtccttacaagacacaactatacaactgtgtgcagaggtagagaatcatttctttagtatgtttttgttgtttttaatcaggagggaaactctctgcaaccccctagcagacttcccatttagctgcagtggccagaatttgttcacctgtgcataccctagctgcaagggaggctgggaaagcaagtattggcacttccacctgccatagagggaggtggcctctgtcagaaaagaatgatgatagagtgggggaaagtggccctcaggaagacagctcagagtgactgccacagacttctgttaggtttgagtttactcttgttggctgacaaattctttccatgttttctcaatatgttttctttttaaactcaagtttctaaggaaaaggatctgattgacccagttaattatttttgagcgaagtcctccagatcaatgaagaagcgttaagtgtaaaagaaatagacattaaagacttttaatttattcacaagctatggatgcacaccttaggtccagtgtctaccccagagtgaatcaactgttagcagaggggagggattacatagtgggaaatgtatcttgtactgctgctgctcatctgggactgcagatcttctggcactggagcatctgtggtccatcagaagaatgggctgctgagaagcaggggtagatgtggaggagtggtccatagttagaataggacaaatagcagactagtcctgggctctctatgtcttacatgaaaagggcactcctagtcctagtgcctcctattgggtagctgtttctttgtggtagggctggttcctcttcttctgggtcctggcagagctaaagcacagctgggccagcacagttggcagaagtaggagtgctgttggccaggactttgcctggagatgggtataaaacagaggcgactagttctaaagcccaagtggagcagacctgcccaggagtcagtggcactgggttaagtgagtttcccatgctctggagtctaaactagcatcctgctccttggtaagtataatgaggagaagtgggctctgggcctagaagggcatgtgcaaggctttcttaatggggataccctctggggcctcagtggggcaaggaacaaagggcttggattcccttggtctaggagcagtatttcctctggaaagttggtgaatgaggaccttgtatagagggtgtcttggggtctaagatgggctgggacctggcctgcagaggaagcatcagggaggctgtcctgcctgtggtgcagcagagcagtgttaccctcaggagatgggaaggtagtcctttacaactggaagacacagccaagctcagcgtcagtgctcatggaggatgaagctgaggccctggctggaaggctgaggcagctcttttgtgatgggaacagagctgagttctagaaaaggggcagcctcctccttctctgtttactatggtgaaatgtaggatgatgccctcgggagggtgtggttatttcagttcaggagccccagaaccccacaggtggtcctgaagcccagaaagggaagcagtgctcatcagtggccctggcatatgctggcatgtaatcatcagtggccctggcatgtggtacctggcccaggcaagaaggacccggtacaactgtgaccacttccaggattttggctgtgccttgagtggggctttcccatggtctgaaaggggtgtctctacccctccacacctgcttggcttggctgggtggttagtggcatagatctttggctaggttgggtggtggaaaccttagacaggatagccagtcagattcagatgggctctacagggctggggatagccagttagctgggaggagtagacctaggctgatacacagtgttgattcgtgtcccaggtctttgggtgacgcccagaagataccagagccagcagagtctccatatgaagtagccatgggtgcttctctaacagtatgttatgtacacccttcatctcctaccagccagccagtctgttctgctgtttaatacattgggtatgggccaaggagattcttggtgaagtttcaagatgaagccagagaaagggcaggcaaacccagcagcaaagtgaaggcaagtcaaggaagagctcaggctccagggtgaggggtggtgcttggcagagaacccacagaagggctgtatgtactctaggccctgtttggaactggggtacatggagtaggcttggccatccaataggaacccaggcttttctttgcaaggtctcaagagtcctggtcagtgtgcttgagcaggtgaaagcagattgaaccagggtgagggagtatggaaggtaggaaggagttaaaaggccagggttctaccctggctctaccactcatgagcctcttcttcacttctgtgggactcagtttccctactggaaatgacagctgagtttgaaagtgtctgcaagatctggccaagcattccaattctgcagtttgttctgggggctatatggagtggtctctttgtaagcaccagcctttgcctccctcagtcttgacctcttgggttccaaagtgtggagacaggttaggaacctctcagtttactgctgcccttatgttagagcttgatggaggcccacatctcaacagtggagaggcaaatctgtttaccatattgaaaaacctgaagagttgctctcctgaatgagcagcctctgctggccccagctgggataagtgctcacctctgatagcccagcagtcagttcaggtgccctcagttacctttttaactagtttcccaagaaacaaagaaacccagacccaggctggggagcacagccacccccccttctcagctccaaaccaccttgtcacagatggcggtttcttcagctcccagctcctcaaacaaagcccatacattcctgccagattcagcttgcaatctttcattctgtccaagaagcaaatctgtttaccatattgaaaagctagaggagttgcaaaaaaaaaagtggagagaaaaagctgttttatgaattataaaatgtgagcttgaatttttttaccatgggattcatttctgtatctccagaatggaaaacaaaagatagtcaggatacgtgtgtgttgaacatttcaattttgaaaagttacagaaggagttttgtaggtaaaccttttcctctggatcttagaggagggaaaatttggtgcttatttttcaagaaaaaaagtagagcctgtgtgagccgatttccagcatgttttcttacctcccctgtgacaggtgtgaacttgagtgagagatgagaaaggagtaggtgtgtccgtgctttctttctgcgctcagctcccaaggggctcctgggccgggctcaggtggcatcagtggtggttctttgtccctgtgcagtgctggaagaagccactaggtgggagtcagggacaaatgctgggaagtgaaatcccaaagaatgaggtcagcatgggcttcatatgagaaaacagcttttaatttttctttttcagacaaagataacataagcacctctcattattgaaactgcttaactgcacctgggtcagctggcaaagataattctttgccattttccttagaaacagtggacaaagggcagtcaagagagggctccactgtttagggtgggggagaagagacagggctggtcctgggatcatagacctgaccttcccctgtggatgtggggagacctctccagacttcttgactgcagtgccttctgctggggtgctagtaggttggccccttccattcctgcaggcatttcctagcccacagtttatgtcacgccctgccctagagaagcttcctgtcccctgggggattttgaatgcccttttcctgacacagcagccaagactgggggccttcagccactgcaaatttagcagtttcaattttcctggatcttgatccctgccccccaaagtaaatttaccctactaaattctagcaatccggctcctttcagacctgacctaaagagactatttcagcctctaagaaccaatgtttataaatgaccaagaatgtgcaaacactggtgaaagagcaaataaatccttccccactatatttcctgcttcaggcccaggggccgtggtggacagtgttgccaggttagcataacttgaggtctgagcacgtagacacccacttaccctccacctacaaaagaaaatcctgccagagatacactaccaagagccttctgccctttcagatacctgctagtgggcaggcaggctccagggaatttatgcttctaggcaagtttgtttagtaatctatgtttcgaagaatgttttgtttgttttgttttgttttgttttttgagacggagttttactcttattgcccaggctggagtgcaatagtgtgatattggctcactgcaatctccacctcccaggttcaagcaattctcctgccccagcctcccgattagctgggattgcagttgtgcaccaccacacccggctaatttttgtatttttcgtagagacggtgtttcaccaggttgacgaggctgatcttgaactcctgacctcaggtgatctgcccacctcagcctccgaaagtgctgggaatacaggcatgagccaccatacctggccttgaggaacttttgaaagcggtttcctaacttcttactcctccaagtgttgtcctgggaccagtagtacgagcatcacctgggagcttgtcagcagtgcacaacagcaggccccatacccaatctactgaaccagaatctgcatttttactagaaccccctcaggtccaggcagttcattctggatggggaagcactgtcctaacccagggattagcaaaccatggcccacagttagcccactgcatatttcttacactcatcagctaagaatgatttttacatttttcaagactgaagaaaaatcacaagaatgttttgagatgggaaaataatataaaattcacattttggtgtccataaataaagttttactagtacacagccacacactggtttaggtattggctgtggctgcttttgcactgcaaataggagagttgagtatgagatagactacatggcccaccaaacccaaatatttgccatctggcgctttacaggaaaagtctgccgacctttgtactgatctattttggaggtgcattctccatgcatgtgttctgtggaggcttgagctgcagtggccaggacttcctccacagcactcttcactcccttcccccgcctccccttctcagcgggcccactgtgcaccatgtctgttgaaggacacaagtttacatctgacttatgaggatttatgagggagtgtcctggcagctgccacctatggcccagaggtgaaggctcagggctgagcggagcccaggatgcctgtaggtgataggtcagtggaacagcacgtgaccatgagattcctctcagtttacagttctgcctgataagatgctgctgatttctggtaggcagcaggagtaacacctcagggggcctcagctcctttttcagccattccctcaagtacttggaattccagccaggtaggtggcaatcctggggttctcttctagaccctaggacaggggtggagcaagctacagtgactttccccggcaaacctgaccaccctggcctcttagctgtgtttttactcccagaatgctcagcctcacagtctcctgcccttttcccacagctggctgctgcatgttgcaggcagtaatgaatctgtttgtagatgagcaaagtacttccaggaaggccttcgggactgttaggtcactgtagtgacccgtatttgtgtaccctttgtgcttcctgaggacttctgtcttcagagaggggtccagtgagtctgagacaccacctcacaggagcagtataatgggagcagcaagcccaggcccccgagctcccaataacaaggggagcctagacctttgggagtaactacctcggccaattaaaagctgggcttctagccttttgggagtcatggactgttctgataatctgacaactctttttcagataaagatttatgaatacaaatagtagtactttctatatatttgacgaacatatttaggggctcatctgatccctggaatcccatctgtaaatcaagtgaggtgccctggacaggatggacttctagggcagtggtgcagccatgggtttgccttgccaggccagtgtgatgagggagccacgacagggacccagctgcccctgggggtggggtgagtgagcgaggaggtgccttagcttctgaatccatcccatttcactcagcccttcccctttccctcctgccaacctgctcctaggtcttttggggtgttaatttgtgatttttgagttgaattacaacgtaagtaaaatgtacttggtgtttaaggaaaaacaaggctgagataagacttgctacttgagaatgccataaaaatgtcaagaatttagctgcagtttatctggattcttccctcccttcctcccttttctgtccctttctctcccctaccctgcaccccccacctttgttcatcacacattgagttgagctaacagaggaaatgggccccgtcttttcctttttgtgtcgaacatctttaccctggagaaacggaccttcaagtctctttccttcacatagaattttagtcttactttaccagtcttatcatttgagccttattctttcatccaaaaaatgtttaaattcgtactgtgtgctaagaattgtaggcatggaagtaggagaagtgagttggaaatcagacacacttctgacagtctggtgcaataggagtggtccagtgtgacaaggtcagtgatgaagtagagaggggaatttaggtgctcaggaagggatagaagagggacacctgagccacagctctatgtaagctgggagtgagcaaggctgatgagagcagccacattggccacctttctcttttctcttttctcctctcttgtaccagaacctaaggaagagcactgcactcctcccaggagaggggagaattttccaccatcctgtagaggctggaaccttgcgccacctctccctgtccagctcccaaatcagcttgtctacctcctcttccttggagtcccagatatacctttattgcataccatatgataattcttaacccagggcatgaagtttttcatttgccttggatgcggggaaaatgtgtattgactggatgaatttcttcatttgacttgttcaggcttttagacagagaaaaaccaacctactgacccctgtacctttagagatgttcttccttggcaacatcctgccatagcacgggcagggaacctgggctgggtgggtcacactgtgctgtggagcagggccagaggtgaggagcaaggggctagagctcagcgcatgggcagcaaagcctgcttttcctttctggcctctgtctgggtgtgtctccaggaatttactcctccccttatgccagctgctggctagagctctcctccttgccgcctctgtgatctctgtgggctggcccagcctgccggggactgtgctgccaggcattgtttctccccttttgggccctgcttctggccctggtggacattgaagccatgctgaggggcatgcggcatgaggggcatgaaggactgctcttcagactgggagttccaggaaaccccggaggtgacccccaagggaactgggaaggcccaggcagtcacaagctgtgcatctgcaagtcctttgccacagcagagctcggggccttgcgtgtaaccacagttcccaccgtgtaaccacagttcccaccgcacccacatcaaaggtcactttgataatcagccatagccaaaggccacacattaagggctggggaagggagaaaagctgtttttagtggggagctctcaaaggagatgggaataggaggaggtggggggtggcatctagggagtgctggaggggccacctggagagcctgcatgtgacctgccctgaaaggaggaaaacagctgcagctccaggtctccgccagcctttccaaggcccctgtctacccagcactgctccctgagtctcatggaaatgcacgtgaagcagcctcaacctttccacctccttggtttgtaaagcaggtagcccagagtgggggacagccagagaggcaggaccctccagccctggcccctgttcagaatgtggcccccagggtgccctggctggtggccaacagtccagggccagactcccctgagtttgcggcagttggtctctaatggatggtaccaccagtgccaaggacagcaaacgctctgtgctgggcccgtcgcacagcaggaccaagaacccagactggagctgcttttttttggaaacaacaggctttcctcagggcacagcccgtcactcgcctggaaaatgggtgggcgtgggcttcagggcgggggtcaggctgtgtgtgggaaccagtgagctcctccaagagcagcacttatttttagtcttctccccagtcccaaataaactgagagcagctgggagccctgggtaaatgcagagtgaagcagagacaggaaatcggggctctcagtaatgagttccagccactccagaagggggaagccagacaaggaattttcttcaggactgtttccctctggcaggctccggtattatcactgagaatggtcccgtgtgtgtgtgcgtgtgtgtcatgtttacaacttctgtccaagtcttctttcttttttctctacctttgtgtgacatttgatttctccgcagggctctgaatcccagtcctggtgcgtgtgcgtgcatgtatgtgcgtgtgtgtgcgtgtgtgtgtgtgcgtgtgtgtgtgtatgtgtgtttgttggggtggtcggggaggacactgaagcagcacggtctgctctgtgtcgctgtgtgtctgaaactgtctagggagaggctgaaggacgcaggccagggaagtggggaaatttgaacacagcttggagttcttgaggggggagggggcagaggcaaggaagaggagagaactggtctccagccaggaaaagggctttttccaccaaggcatctaactgctgacatgggtgcccagcatggatggggacattgatgtttacaagcatttctcgtggctgaagagggtaagtgactggctgctttgtctgggtctccgtggagataagtgagggggagacgctttggggtgttttggggtgtgtgtgcctgtgtgtggtagggggaggtattgtccagcaaagccctgctgtggccaagttcttcatgagaatctaattatagacaccagggagaaaacagtcagctgtctttgtttctccactgacattctagtgaatgagcctctgtacagaaaggcaagaatggagtgaggaaagttggttattttaactttggcacctaaacagtcagaggctccaaacaccgtgaccagaagaatgtgcccaccgcttttcagtttgaggacacagggaggaagctgctgcctttttaaatgcattggattcggaagttgtttaactcgttctcactctgatgttatccggtggagcacacatctgctgtcagcagaatgagcttctgcatttccggaggaaagctttcagggagttctctttgaatgctctgaagctgagggtttatgttgcaagttgttcatgccctttctttagaggataaacctgagtgtgtggtatgagcaaggaatgaacggacgttgggggctggagtagcatcatactcctagaattcaggctgtttcctcttttgtggctgcctttaaattggctaagataggtatgaatttattttcacacgaagggattttaggctgagtgtttttcagaggcaggaagggcaaaagcagctgacaggttagagatttgacattgtaactgcagaaggacagaagaaccaggaagtgtccagcttggaaggggcatgcagatgcccggaccccgactcccggacactgagctggctggcttttgtgtgagtgcagcagcactcattcagcaaatctgtactgagtttgggtactgggtgtatagtagtgagcaaaatagaaccagcctcttgtggatcttctacctaatactggagatgtaggtgaaacagtcccaggaaataaacctcagattacaaacaataagtgtgcctggaggaagaacagaagacacgggactgctgttttgatggagaagggggttggggcggtcagggagtttgaggaaattatacttcgctgaaaactgaaagagcagtaagaatgagtcaggtgaagaatggggtgaagaacattccaggcaaatggggcataggggatgatgtatatacaaaggtcctaaagcaagatggagtctgctgattgtccagattgagagagagcccatgtggctgagcacagtgatggcagacagaggcgggcagaggctgggatcacgcaggacagtgaaggccacggtaaggcttttgggcaacatggtttgtgtgctgggggacttgtagcagggaagtgacatgggatacattggggggggtctagtttgtattttaagaaaattactctagctgtgatgtggtatatggtaagctatgttgggaaaagtgaggcaactgaacacaattatagggctggagggcttggagggatgggatagtacaaacccctcatttaacaaagcccaagaggggctaagaacctcatggtattagtgtcatagctattagtggtgcagcctggtcttgaaccctgttctctatctcccagtctagttctctttattcattttctctgccaaatatgtataaaattattgctttagaacccagcagaaatcctgtctgtgcccagcccctagggcatcacagtcaccagaaagcatgctgagatgaccagacgttttggcaaaggtttgcatcatcttaggttttttttttaagccccactggggagatactgaaaggaaatatgtaagaaatgcactgaccatcacttggtccttctttccctgtatcccaaatgaagcttttaatcaagaaatcctttcagccaacatgtgcctaggattgtcagagccttgtcccagcccctggggcagatactgtaactctgcctgctacaggagaagttatgtgtgtggaggaactaattttgcatgtgatgcaatgtaagaaggcccttcttgtcccaagacccagggtatgctggctcctgtggacagttggaagtttgcttagggaaactttaagcaaggagactttagaaacccccaggatgactcatagcaaaacagatatttttcttctacttttagaattttaaagagcattttacaaaagcaaaactcaaagtgtagacatgtcattggcagtgtgataagagtattttcactattctctaccctaaacactactgccagatttttaaaatcttcttaaaaaaaaaaacaaaaaaaacaaattccctttcgtcctgtgaccccagtgatgagcccccctggactcacccttaatctggaagaaaaatcaggcccttcggcttgcttggcctttgagaccattagcagcccaacctcaacttacctttttagttttatcttttatatctaccctgatgagctcccaagtgtatttcttcccttttctgagcttttaccacagatgaccacctcctctctaactctcatccacttcaactgactccatccaggctgtcttttcccaggaaacctctgctggccctccctccccacctcctgtagcccaggtctgcagcacttcccatctgcatggctcacccaccctttctcctgtgcttcagctgaggtggtgtggagagctggtttctctgaactcatgcttttgaaggtagaaacactatcgtcttcattctcctttacagagggcatagattctggaagaagaggttcctggtgccagagcaggagcccttgccctttgagcagtccaaggtggtggtgtctcagggcaaaggggagatacttatgttcagagaggcatggagctggaggggaaatatttgctcagaaaagaaatcttgctccagggcctgtgtgggatgggatagtatatactattaatattacagttaagaacatggagtctggagtgaggcctgaattagaatcctggcattgccacgtttaccagctgtgtgatccaaggtaaattatctcaaaagtctggatttctttaactataaaataagggagataatagtacctaccacatacaggctttatgaggactcagtaagatagtacgattagtgcagtatcatgcatgtaggaaatactcaataacatgtttgctattaactgctattggtgattatcaggaagggagaagttgaaagaggaacagatggaaccaggttctctcctagaattgcctctcaggccattcagtgcttcagctttatgacccttcccatactccagatcaaggtctcaaaccaagcatattgaagacctagaaaaggcagctgcaacctgggccaccataggtgaccagaggcctcattggctgctggatctggccagcttggctgtggttgctgagtgaaggctgatcagggctgatgctctagttcattctcctaacagacaaagcctagggataaggtagtctcttgccacaagtatccagagggactcagtcacaaacagctcacacctgttctacattgagtccagtggatccaacccacacaaccatgaacacacctctaaaaatagctccgagcagggtctgtgggacccacccactgctctttcggcaagagttcattttcccaggaacagaaatcccagactgtcagcatcttcacactgcttcctggcttccagcactctcagtgcttaagcaaattccaactgtaggtcacaaagaaaatggaatcactacaggtcccccatgcagttggctcaggttctgcagtaaaaagtggaattaactcaagctgctaatgtgagactttattctgtgtcatctggtgctcaaatggttgatctagtagcctggccacttgggccagaagagctgcaaaggcagacacggaggtctcctcactccagacactgacttgccttgcattcatgttggactgcagtgaaagttacagaaataggcagcagcttctgtgaaggctgttcctactagttaagagcatggatcctggatctagattccttgggctcatatctcacctctgtgtagacttgggcaatttatttaaccttcctagaattcaatttccttgattatatatatggataaacaattctatagatagatagatagatagatttttttttttttgagacagagtctaggtctgtcacccaggctggagtgcagtggcacaatcttggctcacttcaacctccttctcctagcttcaagcgattctcctgcctcagcctcccgagtagctgggattacaggcatacaccgccatgcccagctaattttttgtatttttagtagagatggggttttgccatgttagccagtctggtctcgaactcctgatctcagatgatgcgcccgcctcagcctcccaaagtgctgggattacaggcgtgagccaccgtgcccagccaattcaatgtatgttaagtgcttaggaagcactttataagtgttagagttatggggaggatgacatcgatcagaactgacaacctctggttactcgggagccaggtaccccaccttgattctgaaaagagaggtttttcaatcctatgggaaaggcaacagtggatatggtcacccaagggcactagcttcctcaatttcctatgatacctcctatttctggccaacacacccgagatgcctgtacattatgtttcctggtataatttagaagctagaattctgccatctctgacatccagcacctgtaactcctgccagctccttgaagagaggcctcttttacccagtgggatttaacaaactggcatcacaccagggtcatttgctgaacaacttgtgggcactacagagcagcacagccattgttggttttgtggactggcagcagcacttagggatcctttgactcatccctgcttttctctgtcccttcctccatagcagctctttcacacttttccattagtcttcaaccttatactcccctttcaactgatgtcactaccaatgtcataggaaaaaaaaaaaaaaaccagccaaactgagatgagtctcttcaccctccctccctttcaccgcaaaatgtaactgtgtttcagcatcctgtttcatgggccaggagtcccttctctcagccaaggctatcccagtatcctgtccttgacccaatcctgttccagctcctcttgttgctctgattgtttcttctctcagctcctccctgcctatctgtcccttgcccttggtggaaaatgcttctcctcaattctcagggaaaaaacaaatcaaaactatctttgaccctgtgcttgtctcttcatgctgccttataacttaccttcctttcactgttaagattcttggtgagttgttagcctgctcgttcatctctactccctcctggtcactcctgaagccagtgagcactaactttgttcctatagtcatcttttaaattccttctgtaatgttatttttgctgcctctagttcccaggcaatcttccccatacattttcctttgtattcatttccatttggaaatcttgtaggattaatggcattcttgtgacccgaggagcagctccttactttggctcttgcctaattctgtgttctcaaactttggatctttcatgccgaagagacaccaggctctaaagcctccaggggagctaagacagtcacagcgcccactccaccctaactgtagcacccagtcctgctgcactgtctctgaaggtgttttcagtaataatgactcagtgcatctattggagttggcaaggtgaggacagtcttcaaagagtcttctctttttactctcctcctggctttcacatcctctcattacaggataccagcacacatacaaatgctatttctgcagcccagtgctgtaagctttttatgtgtccagctaccagataaagagaatttagcagtgaccaagctcagccaaggttataattttggggaaaaaaaaaatcttggtaaatgtgtttctctacaaatctagctccccaggaagatcagttaggagcttcatcccagccccttggttggagagctgatggccagtttatcttcagggtgtcctgtgtttgctatgttagttctggaagaccagaatatctgaagggtagtgattgtcatagcttcatgggtagcatgtctgtattgggaaggctatttccaaagctgctgttctcacattctcctaggggtattcctttaaagccttcagactcaatcattcaaatggtgcctccactgtaaagcctcttctctcttttgaaggtgaaatgtttttgtctctcctctatgcccctgccattcatgtgcatacaactctttatgatagtacttattacatcctgctgcaaaggttgatttcttttttccttctgtccttattccctgtaatactacagagctttttaagggcagggactaaatcattgtttagcacagaaagtggcacctagtgggtgctcaggattattcaagtcatttcataaatacattcatgacgtgtgatgatgtgaacattggtcaaccaagaagctatttatttgctgtttatgaactctgctttgttcttccttaaaagaggacatttagatcattggatgatagcctcatcagcaatacttaacctccccttatatataattgaggggaggagggaataagggtcaaggtcaggataggctttctcttgttggactcctggtagccgaggatctgactgcactctattcacattgcatttggaagaaatttctttaacactgtgacaaagatggtagattggcttgaccgttcttcacctagaaaaagcagaactggtcctgggaatactcaggtttataataaatgccagaaagccctaaaactccttaataaaaaaatctaggggaagttttcttttttataagaacctgcctacactcatactactgggttcccttggtgttgggtaaccagagtcctgtaacaggaattgactgtagcttttgtgatccaatcatttttgtttatttatttattttggtccccttacttttaaggtttatgtcttctaagtttctaaaaggggttgcatgtgagtggtgcttctgagcttaagatatagccttagtaactttgatatctcccctgatgccctgtgcctggcagctatggttcacttgtaactagttttctggattttgataagatcctcttgactaggcagcctggaaacactacacattttcttttgttttcttattcagctaaaaatacatgtcatctaaatggctaaataaggaagaaccattttaaggcttatccaggacaaggcttacccaacgtgctgtgttcaaaatctcagcgtatttacaggcaaagagccatcatataatttaacatgctctgaccagttgggacagtgtatgtactgtggccaagatcctgaaggcactggaatttatagcttattagaagcactgaaggaaatgtaactctttacctggccaagatgacaactattgatatcaaaaaaaggaaggcagatgcattttgaggatcccaaggcaagagctctgagaagcaactgttggcttcaaaaaccaacatgatgctagagctgtcacactggggagccgactgttttaggttttcccacactccttacttgtataccaatgacacccctgttgtgatctagcccttgccccatttgactactctggaaccaactccttcccctagttcaatgaagtacagtgccagcaggaagtctcctgggtcatgccagttggggagtgctacagaactgccctcatccagcatccctgaggtgtaccagagcacatgtgaagagtgtgttctccttgcaaatggccagccaggccataaagcagtcatgctgcccaccacaaatctgcaggaccccagccatggcatcaagcactcaccctgtctagagctccaaggagagactaacatggctatcccttggccaagctacagtggaagggctaggccaggagagagcattgtcatagatctgaacagccactgcagtcagagggtgatgtctttgaggaggccgctgggggttaacttggctgaaaagttcatgtttaacccaaatttgaactaacctctagattggaacagaaataaaaacccaagtgtttatgattggttattactagctataaaaattcccagtgtactcattataaacatgtatgtagcacataatacttagagtacacaataaaacacttgtacgaaagaaaaatatgtggccatgaatgtatgactcaaaaatgtgagcacttgttcagggatagtggagaagtgaactcatctttggcaatgtggcccaaagacatgatcccagggctattagctaatggtgggttctgcgttgtcactgtcacagaggctttctttttgttttgttttttcatttcaagcctgaaagtattttggttattgttcccttgggttgtttgtacagatcttcatagatatttcttaggcatcctgatcagaaatattgcccctgttgttctcttacacaaaaagagtgaattaattaaaactttttgtagaaggcattaaatgatgccttctaactcatgcttctaactgaacgttggtcttttagattaaacaaagctaaatcatttataagttagctaaattcatttgttaaattataatttaaaaatcatttccatattcctatgattattcaaaaactgtttatatcacacaggaatttttagagcaccctactataaagagcactctgtagttttagtgccacacgttttcaggtatgctgacctaacttgaccctttctgttgctccgtgaagcatgattttttctattgaaaggatggaaagcctgagatgaggtaacctacttgagattacacatggttaggtgcagccccagcctcctaattattcttggtttgtcctctttctgcagagaaggtggtcccttggggaggaggatgcaataggaattctgtaaatgaatatggaagcaccacaagaaagtccccagggatcccctgacttgaagttcagctgggccaaatgaggggaacagggaacccagagctctcagcctcccagcgcccagacctggcatttgtacagctgtgtctgacatgtaattctttcgacataacttcttaaacagttgttagatctatttctgttatttacccttcatttattcattttctgattcattttctgataatatcttttagactttagctcctgtttatttcttgttttgtttgaacttactttttcatatcacacatcctgctccccacctccaccaaccccggttgatgcccatgggcctgttgcatcttgtattcattccctgtcttaacctttttgctctacatgggaaataagaatggaagcaaacaggtggtggatagaaagccatctattccacacacaaaggacactgagtgccctttttatcctagtacatcccacacagacactccctgtgccacaaagtagatctcaattagcccctgatgataatcctggtttgaactatagttggcttaggactgacagccctgtcttaaaaattgccactttaagcaaatcaagcaatagtggcagaattcctttgcaattcagaactatatccaaatagcaggaattctttcctacaagtctgtttccaaaggagtaaattttagtcagttgatcaccttttgagacaaatgtattaaccagaacttttggttgcaaataacagaaactcagtttgaactaggccaagagggaaccaacaggaagggctggaatatatctctgcctttaggcagcgtgcaccggggatgagaatgcctccagtctttttcttggcttttgtttgcttttctgtgcacactgggttcatagctgtctcttgctgcaaaccagctttttccacgtggagcaggacatggccactgacaacctcagaactgtggcaccaccactaccatgctctgttcccaagtttaaaaattcagaggaaggatttcaacaagtcaagcctggatcaagtggcagggagatgaggatctttctaagaagatggcagccctcatttataccacataattacagtaaaggcgatgatctcagcctagtctacacaaacaatagattccattaaagcagggtgctgattctctgccaagactgatacaagtcttctctgtttcttttccttagcaagaaaacaaggggaacaatttggctgatctagggttcgccacaattcatggtgaagtttcttttttggacctgacatatcccctgaaaaatctcatccctaaaatgcaatgttctccaaggtgcagaaatcttgatttctttgagtatgccagcaaccagctctctgtgcatgaggaacttatcaagagtaaatttcttactcagtgaccaaggggagggatgggagaggtagggacaggacctggtttaggttaggctagtatcattgtacggtccaaactgccccttatgtggggacttaactatccctgctggaatcttgctggtcagtcagtcctctccctcctggctactcacagttctctctctgtcctctccctgctgaggctgattgactatcatgatcaactccaggatcccaaccatagaataccctgcacagctgatacattttcctgaggcccctctcagttagggatggcttagaaaatacccacaccttaggctgttaattgctcaagctgcacattaggcttgcccagccacggcagtggtagcagtttgggtcttacagaaacagaccctaggataacctgtaagaatcaaggaggtgtgttgtcactgtttctgaagacactctggaatattactcccaaggcctagggaagaccttgatatgacaactctgtgctgtgttttatatttgcctccgcgaggtctgaattttagaggatgaattccttgtgtccaagacttttttcagcctcttgagagcaacacttgatagacacaaaggtggcttggcttcaatgatcttgactaagggtgctgagttcttaaaaatatccattcgagaagcccttgtcttgattcagttccgtgatataggagaggtagtatgtttcactgtggcattctttagtcaaaattgaagaggatgtggaaatgtctggagttaacagttctccacagggcacacagatcacatggttctcactatatttttaggtaactaacctgaattacagtatcagaaatagctctgaccatttgaatgaatggtctgaaaatttgaatgagaagattgacttttccctgtcacatttgtagcaataaccatcagaacagagggggaggaagtttgatcaaatatatgtaacacagcttaccattggcaggtctagcctagtggctaatgtcattggttgagtaaaaattagctctttcttatattcatctgtggattgagcatccttaacaagtataacgggggtggatgatactctcctttatagtcacttgccatcccacagtggggaacaatagaaaattagcatgtaggccaggcacggtggctcatgcctgtaatctcagcactttgggaggccaaggtgggcagatcacaaggtcaagagattgagactatcctggccaacgtggtgaaaccccatctctaccaaaaatacaaaaaattagctgggcatggtggtgcatgcctgtagacccagctactcaagaggctgaggcaggaggatcgcttgaacccaggaggcagaggttgcagtgagcctagatcgcaccactgcactccagcctggtgacagaacaagactctgtctcaaaaagaacaaccccctcccaaaaaaaaaaaaacctcagaaaattagcacgtagcatccttcagaatttgattggactttcttctctgtgaaatgtgggcatggtttttgcaacctgacttcatgcgtggagagctgggcaactgctctatcactgacttacctaatcaggaacatggacaagacttttcagagacacctcaaacctggaatcatgcagggatccactatccatccaagccttctatttgcaattccactattaaagaagcaggtatacttgttgaccaagcaagctgtctttaaagtagagcaaaacagagatgtgtcctaactcagtcttttaaaatatttttctcaataaattggaatcccattttgataaccacaaagcttattatgccttgatgatgtagtcattttataatgcaagaatgataccagaacgtgattgaacctgttgccaggttataagaatacagaatatacagattcacccaaaggcaaatccttaccttaggctgatgagtattagcattcagcaagacaatcctcttcttggccctgttctcagatgctttccaagtttttctccaggcagaggtggcatttgatcctggcctatgcccttctgaagaacgcagttttttttaacatcctagtcctatatagatcatgaaaacacatggctctgacttcatcaaaagcaaaggatagtgatactgtgggtttccatctggaacattatctttcactgctgtttacctttaaaaagcttgctggagaacggtgattttgaaggacctgtagaagaggaagatgcactgttcctctagaacagtgattggggtgggggagggacctgtctgccatgcacaccactgctgtatggaccagtatgcctgctaggaaaggagttggctcctcgaatctgttataggaggggcaaatatgaggaaccactgttctaggtcctctaacagtgcttctagattttcaaatatattttaattactcaatagaaacattttgtaagaaactcaaacattatgtcaaagtgctctgaacagtgcctggcacatgttgagcacaaggtgcttgctgtgtatttacagcactgtgcctggaccatattatattagtctccatnnnnnnnnnnnnnnnnnnnnnnnnnnnnnnnnnnnnnnnnnnnnnnnnnnnnnnnnnnnnnnnnnnnnnnnnnnnnnnnnnnnnnnnnnnnnnnnnnnnnnnnnnnnnnnnnnnnnnnnnnnnnnnnnnnnnnnnnnnnnnnnnnnnnnnnntgatcccccttctagcatgtgctatagaatctaggtcatacattttattaactgaatttatgatttcaactttcttactcttttttttgtcaactagtaaaaatagttacctctctgggtgattgtatgggtagaccttttattataatgaagaatatactgcacaccatttgaataaggcatagttggtacagtggcttgctggagtctctggaagaagtcttgcctttggtcttctctccttcatttcctgccagagaatgggcggctgccagtgctaggtggctccgtgtccatgtggacttcggcactggggttctacctgcagagcttcacttggacacctgggtcctgtttaattctctgtccactggaaatcaccatcatgtgagttctttgacagagaagaagttgacctgctattaagaattattctcctaccttttcttctctggttctgagaaaatatagattataatatattcttggattctagtcagagaatttgatcatgtgagaaccggaatattaatttaacaacaataaactgccattaacaaagaagtcagttgtgattgttaaggttctttgtctgtggcatgaaagagcttccataacaatgaacaagacataggctccagaggggctggagcagaagacagtggtgtggcagcaggtgctgcctggcacagctggcctggggagtggcccctgggcctgtcctctggctgcaccttcaacaaacaatcaatgaatctttcactagtgcgcatccagggtttgaatgcggtatgcttggtccacatttctgttctaggactgggcatggctctgttgcctccctcacctatgcagtgcattgggaaggggtgggatgaggggaggaaggaggtgccttttctcatggagggtggtgggagagcccatgctaaaagttgaaatgtggggaaatggcctaggacaaggtggcccaactctgggtctctcacatctgcctctttgcacaattaagactttcctctagggtggtagacacctccctcgtgaatattgaagtgctgatttcactggaccagctcagattgtatgatactcagttccacatttagcaatcagatctactttttcaaactgccaagcctctgggtggcctattgcagaccagtctgatttcagtcttccatttgcatggaggaaggaggtgttggggccagcttggtgacattagctccttctctcctgtctgcccacaaccaggtcagacacacccaagaaagtgacacctcctttctctgcttgggacatttgtaagattctgcctctcctctgacatttcacatcctctccctttcctctcttttctatagtttctggctacctgtaatttccttagcttttgctctggcatccctctggctattatttaagttcttctcaagatgttttgtcttagcttgcttctctcagctctagcactggggaaatgtgatctgccagcctggctaccaaagctcttattggagggtgggattggggtgggaagggacgtgtgaatgaagggccttgtagttgacatcctccatccttcatgctcactgtgatgttcaggatgggcctccatgcagcaaggtgtgccttggcttcaggggaccctggcatgagaattaggagataccaagatctgtgcagaagctgttcccatgtagtcccttggagaacggtgccagctctccaatctcctcaaagagcagaccctcattgtcgccatgcctctggaggctgtgcctctggctaacccagacccagcatgtcaagtcaagcactgctgggcctagagtttcacagaggccctcctggccaggagtgaggtcatccaggaggtggttgtgccaacttccagggcgcacttttcagtggcatgtgatctggttctcctcatggtagttttgaaatcttgtggtttcctgttttgatgattggttttgtacatataatcagtgaaactatcctcacaaattacacacatcccttatttcatttagaagttggtaagatgtttttccaaccttttaagtgtattcttttttttctgtcctctttagtcccaggtaaaccaccacagtgctgctagtaatgaaacctaccaggaacgcttggcacgtctagaaggggataaggagtccctcatattgcaggtgggtactttttggtgagaatcggcttatcctgttacctcctactatgtagcttcccctaagtggaagggaagcacaagagattttctctgttggaatttttctccttccaatgcctatgtttttagaaaagacttttcctgaaataaaacattaagtaactgaggggacaatttaactctagacttggcttaggggggctgtgaattcagtcattcatttatcatgcactcccaagcacccgcttctatacactggcagccccatgaccaggctgatttccaggtgctaagaatgaacaaaatgggccctgtcccccagaagctcctgagtcttgcgagggaggggagatatatcctcatgccactaataaaacagagctgtgggtgatacaggcctaagggtgaatgctaatgaatcaagtccaaattgtctgaagctggatctagactgatccctttaatgccaaatcccctggagctggtaacaggggctaagcctttgatagctgtcttgcttgaaagagaggagctccaaaaccttttacggagaaagatcatcaagggagctttttcgctgttgaaagtttgtgtgccttggtaggacatagagttaggtattctcataagaaggctgttgaagaagcaggcccagcactttgctgtgttagctcttgaaaatataaattgattaagcaagcatttactcaaggtctggtatgcatcagatattaattagtgatttggaaaatataaaggctagtatcctaatcccagctccttaaaagcttaaagggtgatgagttagactggtggtagaatgaagggaggggttgagcggggcctggaacccaccccaggctatgggctttagcttggagcactaaggttatgaggtggcagtgtgtttgttttttctctttttaccttacttattttactctttcattgtattttatgaacataagggtaatgaatgattttaaaaacctttaaaattctaaaaatgtgaagaagcaggttaacacttcggccttttttccagtgttgttggttttttttcttttgcctctattgtaaataactgagctcataccaaatatatagttttacattccagttttgtatttttcttcacttcattgatttcttcattataaaataattgggtatctacaacttgtgagatgctggttttagatgctgggataaagcagtgaaagaagcagactaaattcccattcttgtggatcttccatttgaaagagagagagtgggccaggtgcagtggctcatgcctgtaatcccagcactttgggaggctgaggcaggtgaatcacctgaggttaggagttggagaccagcttgaccagcatggtgaaaccctgtctctactgaaaatacaaaaataagccaggcatggtgatgggtgcctgtaatcccagcactttgggaggctgaggcaggtgaatcacctgaggttaggagttggagaccagcttgaccagcatggtgaaaccctgtctctactgaaaatacaaaaataagccaggcatggtgatgggtgcctgtaatcccagctactcggaaggctgacgtaggagaattgattgaacccaggaggtggaggttgcagtgagccaacatcgcatcactgtgctccagcctgggcaacagagcgagactccatctcaaaaaaaaaaaaaaaaaaaaagaaaaaggagagtgtgaattgataataagccaatacattaactatttcaggtgctggtaagaacgctggaaaaaagtaaagcaggatgaggattgtgtagtaaaaggaagatctcctttacaggaggaagccaaggagggagccatgcagatacctggagaagtgcattccaggcagagcaggcagtcagtccagcccacacactgaggcaagagtgtgcttggggtgtgggaagaacagcaagtggccattgtgcctgcagtctgtgctcaaaagggtggtgcgagctgcctttagaaaggtagcaagggccagattgaatagcacattgtagcacagatgtttgagggatgtgtaatttgaaactcttatcccaatgacatgattaatgaaagagtatccaatgtaagattttgcagcaaacagtatgaaattgcaaacttttgaaccaggacccttcatgattgaaatagcacattcctatttacagaggattacaatttaatttttcaaagtcctgtgtaataatgctccctttcacattcatagttttctaaaattccaaattcttgaataatccccatttaaataatcctaacacaattgggaagctgcttgccagtaaagtcagaagttgaccctagtagtttctactctactgggagcttatgggcagactccaggagtgtctgttaagtgatcactgctgttctgcagtggagctggttaggcagattctcagcagggtagagcctcttgcttaatgcacacagcagcttagccagactgaattaatttagagtccttggcccagaaagttttcctggttctactcatagaacaaggcaaatcacacataacaaaatactttgtttctaggattagttaaaaacaaaaccagaatctcttgtatcttcattataatgtaactccttaggaaaaggatttttatccttttttttttttttttaacttctgtatcctccagtacctaaaattatgcctagcatctattagggtctcaaaaatagttgtttttagtgaacaaaggtcacattttatgacctttatgtattttgtctggatttcctacatcccttcattcgtaatacttagaatcagcgttgaggttcagaaagcccctggagctgaacaattagctatagaatgctagagatcctatgattccttgagtatcaccaacacatggcctcaaggcatggtatagaccatagaaatgtttaaccctcataataagattaaccagaaaacatccttcacaaacagaaactctggattccagtgagcaaagcccacccccagagtcctgcccttttgaaagtagagttagttcaggatggctgagagtgttgggccacagggattaataaacacccacccacaaaggtttgcgtgtaaggtggaccaagttgatagaaagagcccgttcttgtttttttttttttttttaacattttttttggttaaaagtggaatgttaaccatgtgtcaactccaggaatatgtttcaataattcattaatcatttgggaaaataaaaatggagatcttaaagtaggcatattaatttagattagttcctttttaaacaggcgctttataattcagaaagtttatctaaacactcataaatgaattcacatcaactcatgcaccatctattattccatttcagactgagaaataattctggataatctatatgtaaattgcaacaactctaaccaaaaaggtctaaaggatctcagtttatcaactgctaatttcttcactttggggaggacactcattctctctcttcttgctttgaaccatctcttaataaagaaaaaggatcctggggccgtttgctaatagagaaggctatgaaaaccattgttaatatatagttagtgcataatttgaatgacttcctgtaaatgagtttttactaattaatatttttaatagggattctcagcgttcttcagaaagatgactttttttctgccaccgtatgtgtaatgtggcttctctatatttatgacttagagtcatgttttggcctgtgaagcacaataacctttctggagccaagttttgtcagtgctaatacatgccctttacagcccacattccttaattgcatcaaaacactcacctgataggtgagcagtcctcacacccttatgagagaggtaaggtcattggttagtttccatgaagtttggaccgctcttccacacgaggttgcagaagtgctggcaagccagctgagatgtgccttgaggtcggggctgttctggaagaggaataaggagcaggagtccagcccagaggcagctcctgtggctgttgggtgttttactcttgagtctatcaagagcagtaaacgtgacccatgtcatcagagcagtggccgagactccctggtaaggtaagaatctaactgcagctgccttcgttcaggacacttcctccacctgccactcagcaaaaatcaaaatcgttcactgtgtgtaagagtcagtggtgagatttaacggctcccctgaggtggggaggctttcctgcaccatgtcaaatccctggtcctccaccattgctttatttcctggaacaggtgagtgtcctcacagaccaagtagaagcccagggagaaaagattcgagacctggaagtgtgtctggaaggacaccaggtgaaactcaatgctgctgaagagatgcttcaacaggtaagggcgggtgcactgaaggcccttgggtgccgaagcagctcatgtgctgaagcccctttgtgtgcccaggctacagccctcgctgtctgctttcccatcctgcctgggggcgggattggctgctcagttgtacagtgtttatacagcaggtgaaaccaacctgaacgttgagagtggcagagggggtagggaagggaagggctgccctgagatgaataacctgctgagctggttagacagattcccagacagcactttctccagacctggtgcagtgagggagcgctcggctgggggcctcaccctcatcctgtgggtgccatctggagttttagaaagtcaattctcagctgactctatgcccctttcccatctcgctctgcctcttcctactgtatatagtttttaaaataaaaatattatataaataaccttttagtataatttaatagatatcaaaatggaaaaagatatttaactgttccctaccattcaaataatgtcttctccttgttttctttttgtccttgttatgtgtacatgtactttccaaatctgtaatcacaagagatatgcaatttagtcctcagattttgtatgcttaatattacatttttcccatttaaaatttttgctgtattgtcatctttactatcacctataatagattttcttagtaaaagtatcagaattgacttaactttttttcaattcctaaatatttttactgtattataaataatgagctacaattttttaggaaggggtgttgaatttttattgtatcaaaacttcagaatttgttgagaagcgaattaggtttttaaatgaaatgtattaatatatctaatcttaaattttccttaagtcattcttacattttaagttatcttgaaaattaaacaatgactgaagtttatgtgtgtatgccttataactcctggcatagtacttggcacataaaaggtactcacaattacttaaagaacaaaagtttgttccttaaaatgagtggattcaattagaggactacttataatctttcctccaaaagcgctagcattttttttttaattgtcatgatcagcataagactcagattgtttcttgacagcatactggtgaacacaggctttgcattttacctttggtctcatgacaaatgtcatgagaattaatctggtgtttgttagttttgtttgagtgcctttgaagaactttatacaaatgtaagtcagtgtttttatatatatgtcttcataaaaacccgtttcaatgattcaggaacttttgtttgttatcttttcattgctgattaataaattaccacattcttggcgccatttgattttctacttaggttgtgtgccatttctcttgttcataatatttcctaaaaatctgactagcaaaaggaattgaggctttttttttttaattgaatctttcttttgaagacccaggaaagaaaatagcctgatggaaaaaaatctcaaatgatgaaagtattttcacaaagagtgcagaaaacaacctactagattgtgttttcaagtctgcacaaggtgtgtttttgaggtgagaaggataagggaagaagatgatggaatggtgtaaacaatccagaaagagagcaagaacatttgaatacggaagggaacgtgtcagaaggttgatgtttcaggaaggctatgctgggagagtaaccacataatcagaggtcaacagaatgctgcattgtagtgcctgagttatctgactgcctgtgctggcttctctgagccttctctacatagctctctatgacagtgtttctgctccattgtcaaagtctctgtgtcaaggagtctgattgtgatgcccagcaccacctggggagaggctgtctagttcctctaaacatcatcccatggatggcattttagacttttttaaagtcataaactcaattactttttttttttttttttttgagacggagtctttctcagttgcccaggctggagtgcggtggcgcgatctcggctcactgcaacctccgcctcctgggttcacgccattctcctgccttagcctcccaagtagctgggactacaggtgcctgccaccacgcccggctaattttttttttttttttttttgtagttttagtagagacggggtttcaccatgttagccaggatggtctcaatctcctgacctcatgatccacccgccttggcctcccaaagtgctgggattacaggtgtgagccactgcgcccggcctcaattaccttttttagcccgtttattctaaaccctctttcctgtgtgctgtgggtttggtattgggcgtgtggtaccatgtgccatagagggtagatgtcttaacctggcatattttggagtatggtagccacttctgagtttcaaagattcctgaacttgaccaagttatttttctgcccataagctttcattgtattctctcaaactgtcaagggtcaaatgatagcagtgtgcagtgctcctttcttaacaaattgagttcaagccataggacacatctgagcctcatcttccactcatgtgttcgctgggctgggtggcaccagagcttgagatcttttgagttcccagatctaaatccaaagttgaatgttcggccgcacatgctattgctttcctgaagtctgtttgatgctgtttgtgaagacacttgattcttgcaccacagtgctgatgcaatatctctggcttggagtatgtgtgtattctctgagctagggacaggcaaacacttgcctgatttgactgagatatcctgggctgcagggcccttggcttctggtggtaggagcaagaatgactcatggcctagaggcagagaatggaggcaaacaattgcctctttctgccagcctcagaaaccattcctgcctggagccaaggcgagcctgctgctcaaagcctctgaaggaaatcctttcactgtctcagtgtgcgcccttctaactgcctgtagataaggtgcttcctcggggtttgctgctcctgataaccctgcatgctggagacatcctgtctgaaggcagcagctgctgttctactccagttgactgcccatgtaggcctggtaatgctagatattctcatttttcacaagagactcaaaatccagatctaaagagttaaggatctctgcttttaaaatattagcagctaatttaagttttttaaaatgctgtgtgaatcatacagtacatacctataggtcaagcctggcctgcaggcctccaatctgcaacctctgctctagacttggccccttctacaggctggaataactccagggggacttggggaaagccaaatcaatgaggatagcccaaaccttgtgcttaaaggggctccaagaaccccattgagctgtctctctccatgctgctctcctgaccaatgtcaaccttcctccaggagcacaagaggtgaggagttagttccttacctagttcatgaacaatatactcactgtatccccaaccacaacatcctcagtctgtcgctgctcagggctgacctcccaactcccatctgtttttgtctacacatgaactcatccagcctccagaaagagcaagaagacctctcttggggttagacaggcaaatcagaaccaaccagagccagcaaaggggcaggtccacatgagcccacctagattatgaacacttttcagggcaaaataatgtttctgttttgcagcccacggcaggatgtgggatgggaagggaacatgatagctacaagcatctctcaggactgctacaagcagacagctacaagcatctcatagctgtcgacatacacatatagacataccttgtagctgtctacatagacagctacaagcatctctcaggactgcctatggaagcacctagtcagatgtggtcttagactcactgagcatgtctggattgcccaggaaactttccccattaagaagagttatttctcggccaggcgctgtggctcatgcctgtaatcccagcactttgggaggccgaggtggacggataacctgaggtcaggagttcgagaacagcctgaccaacatggtgaaaccccgtctctactaaaaatacaaaattagacaggtgtggtggtacataactgtaatcccagcactttgggaggccgaggtggatggataacccgaggtcaggagttcgagaacagcctgaccaacatggtgaaaccccgtctctactaaaaatacaaaattagacaggtgtggtggtacatacctgtaatcccagctacttgggaggctgagtcaggagaatcgctggaacccgagagacggaggttgcagtgagccaagatcacgccattgcactccagcctgggcaacaagaatgaaactcaaaaaaaaaaaaaaaaaaaaaaaagaagagtcatttctcaaaaggatctttaagggagggacagtctgagtcagttttcactggtctggtattgtctgagcctgaaaatagaactcacagtgctgggctctgcctctttggtccttaagcagatcaaggcattgctcagctgcacagtgaggctatcagaggccagggcccagaattgtacactagggtttccggcatggaccagcgatgttcttgtgactgcctcaaactatgctggcaacaaaaatctctgtatcatggggagggtttccctggtctgtgatataatcgaggcctgtggtggcattttctaaagtagccactgtgagctcactggggtctagtaggttcctgcacaataagctcctctgcctctgatcactgacccttctctagaggaggaagaagctgatgctactcggtggataagaggttttacatggagctggtggtcaaatggagcattttccagagactggccatttacagatataatcaatgtaaacagaaacaatgttcaatgtcaaaacaacacagggaaagggaggactgtggggagcaagtaagggcataatcctgcttttgggaaaccttggacaacaccagcctctatttctatcctccctaccgacccagagcttcagggtttaggcaacttcattttttttacttttaggtgaggttggggagtgacaaatataggggattaagagttcatggatatgggtttctatagatttgctatttgctattgatctgggaaagtcagtgtacctgtttccttattagtagagaatgaggatgacaatatggactctgtattgcctacctcttacttctcagagttatagtaaagttattccactgttattaagcatgagctatcacacagtgagtcaagacactgagcctaagacacaggcctagtagatggctggtaaacttcccaggagagcctttaagcaggtatttctatctcaaagagaatattaaacagagctgtgtacatgttccggtgggaacacaaatctgtctgaggtgggtaagacagtgattcagaagtgaagaaaacaggaatttttcaaatattccccaaaattccctctggggatctatgagctaatgagtttcttcatgcttatcccatgtgatgttgggaatccagactacagggcaaagtagatactttaactccattttacagataagagtgaggttcagagagatgattgagttagtgaggactgagcctggcctcaaactcgagttgactacaagcacctcttctctgcacagtgttactcatgaaagagacttccctgcaagacctgggccttttacttcaaagggcaaagagacttatttttcctttcatgcctttccatggcccactctttcattctggtttcaggttgccagtctggctgcagtcctctgtcattggtcggtaacaccctgggtcatattccacacttaaagatggaggtaattgcttcaagatgtggccctttaaggagagaataggttgaaaggcaaattctttttttcagctttagtcagagcctgagttttggaaaaaggaaatgatgagttgctccgagatataaactttctttcatctcttagaagaagtatttgtccttctgaaaaggttagtggcagttttgtccattgattttttttctaaacctttattacccagtttcatggtccatcacagtaagtaaaacaaaccaccctcccccagaccacctccctccttatttgcacagggaaccttcaaacaattgggagcagaagcagaatgatgcctgtgaagcctttgccccttatcctcagctcgctgcctcccctcaactccctccccatatactgcggtagctgcatgactccagcaggattccaccatgaaggtcaggaagccttcagcagggggcaagcattgcctggcgaggatgtgggtgctccagacagcctggatcagagttgactccagtcttgggtgagaatgagattaagggctccaagaatgttttccttacaggattgacagaataaaggcagccagcaaagaaaatggagaagaaaaaagaaaggtcaggaaaaccgagagcaaggaagattggggtggctaggagtaccttacattgagtggataaagggcgagacagttaagatctgacaaatgcaagctgcatctcaaagtttgtacattggttccaggactatttctgtgccctagttggtgaaggcagaagccaggttcaggcaggcagaaatcttgttgaggagtgacacacacatacacacacatgcacccacacacacccacctactcacccacccatacacgcacacacacccccccatacctactcacccacccatacacacagacacaccctccacacacctactcacccagccatacacacacacaccccacacacacacctactcacccacccatccacacacacacacccccacacccatgcatttgtccagcaagaggacatgggagttgacggtgttagctttgagggcaaggtcaagacggaagtttctttagaatgtcagaaatttgatcatgtttatagcctgaggattgggagctgatggtgagggagagattaaatgcctgccagagtagatgattgatggccctaacctagagtagcacagagcttggtgggaacttactcaaaggcagtacagaagtgagggagagtccaggaccatgtgagcaggagccattctgagttaccagctggagagagaaacaggaccagaactcagagaacagagccaaaggctgctggttgaccaggaagttaccgtaaggtttatcaagttgtatgggaatgtatgaagagtcaggagactgagaaatagccagaaacgggaaggtcagtcaggggcaattcaggagcaaattctggaagcattgtatcctttgatgggtactttttatgtgcacctggaagtattctgaactagggaacagttttcaaaggtgaaagaaccctgcagaaaagatggcaatgtacaattgtggcagtttatccttggaaaggaactatgggcttgctgtttctaagacagggatttaagatatatgaatgagagatgatgctaggaaactttgaaatagaacttacattcagtgaacagatgcattttatcttttcagcaaatacgaggagagattatttgaggagaagagggagacatggtaggggtttagggcttgagcagaacagaaaagacttggaacagttcctgaaaggagtcagccagagacaaacacaagttttgccaggcagtattggaagatcagctgtaattagatagcacaaatttgtacagaaaccaactggcatcattaattgcctttcactagcaatttttaagctgtggagagtggaatcacgacaaaagactaacaaatgcacatgaggcctgttacagggatgagatcccatgaggattttctgctgtggtatgaatacaattggaatgactcacctcaaggtacagagttgataaggagaacaatgttgcttcaaggaagttgataaaccaggaaaatagagttactaagtaactagtggccgcagaagaaattagaggttgagtgagcaagtgggacagatgaaaggtcagaagattgtggccagaggagagaatttcagagctgaagattttagaagcaaagcaaacacattctggatacacgtgagatccaagtggtgactgtgctactgagaagctgaacgaaatggaaagcaaagcctgttggagctgaggtcaaagaatgtgaagccagagtggatactgaatgggaaagttaataacaaggatgtggaagctattgaggagacggagtgcgcctaaagtaggtagaaaagctgttgatcaagtcaaaagcctgaaggaagtaggttggttccttcggtttggggagaatgtggtataagtgaagagcactgtcttagaatagcaggatagatgcagatggtcggggggcaaaatactggcttggaagcagccctggaatagggagcacagtgttctataagttgggttggtggaagctgagtggtctccaattgaaatgacggggaagaatgtgtaatattgttgaaaaaacatgattcactttatgttggaagtagaaggagcaattgaggatgtaggataagttaactcctattaaagcacacattttagagatcacagttcataatagtggctacgggccttgctggatctggagatggggaagtagagctggactgggataagtttgttgaaggctgattttgagtttagggaccaaaacagtaatcatgacaggggcaaggggaagatgatcatgaaaggtagaagcacatgctaatagatataagctagaagagaataagtaaatgttctattattagtgaactatatgaaattaagcaacctcaggtttctaattaaaatgttagtgtgtccaattgtgaatgtctgtttggaatgttagtgtggctaattcaaacactggcatgaccaattggaatggctgttggaactagtgaaaatattgtcttcatcagctggaaccattggtatgactaatcacaacctggtagttaaaatagggattttggcaatgatggaagcagagtagactcttagctttcaaaagagatacattatgaaactttaaaaaatcacatcaaagcagtattttgaatgctgatcagaagacaaaactgcatgaattctttttttttttttttttttttttttttttgagacagagtctcannnnnnnnnnnnnnnnnnnnnnnnnnnnnnnnnnnnnnnnnnnnnnnnnnnnnnnnnnnnnnnnnnacagagtctcactgtgtcgcccaggctggagtgcagtggcacgatctcggctaactgcaagctctgcctcccaggtacacgccattctcctgcctcagcctccccagtagctgggactacaggtgcccaccaccacacctggctaattttttgtatttttagtagagacggggtttcaccatgttcgtcaggatggtctcaatctcctgacctcgtgatccgcccgcctcggcctcccaaagtgctgggattacaggcgtgagccaccgcgcccggcctttttttttttttttttttaagacagggtctcactgtcgcctaggctggagcactgtggcatgatcacagctcactgcagcctcaacctcccaggttcaatcaatcctcccacctcagcctctcaagtagctggaactacaggcccatgccaccacgggtgctaatttttttttttgcgtatgtattttttgtagaggcagggttccactatgttgtctaggctgatctcaaactcctggggctcaaatgatccacccacctcagcctcccaaagtgctaggcatgagccactgtgcccaggctgagcatcaccttaaggtgttcaagtactcaatagtggctttgttttattagtaattgtcatgtatctaggcactggcatctggtaggtatttaaaaacatatttgttgaataaaagaatgaagtctcttgggggatttttttttttccctgagatctcagtagtctgaagacattttcttgtggaccttgacctgtgcacttgttccttttcccctttgcattggcagctgggaagctcacatgtacattatagtccatctctagctgtttatagaagtttatggcatagattttctactaactctgactttaacttattttcctacctgctttaatttttatgatttattttttaatttgaaatatctattttgcaaactgcctaaacacattttgggaataaggtaggtaggcagaaggatggagaactagagaatgaggtaataaagaaagagagggaggtagggaaaggaaagaagggtaagagagtaggtggtgtgggggatgattacatcttaagatactcacgtactcaagactcagagactcagataacttattttatgtgccctcacactcagggaagaactgcttaaggccctttgtggcctgcatagccttagcactgggtcctgataggtagtatgtgctcaatgaaatcttggcaatttgagtgggcatttcctgggctcactgaatatttgttgattgcctattttagcatgtttttttaaatgtctcttaaaatgcttggacttctttctctgtttgggaaactgtgatacaatagactaaaatgagttctggagtcaaacagacttttgtttgaacactaactctgcttgctgggtgtggtggttgacgcctataatcccagcactttgggagactgaggtgggtgaattactggagatcaggagttcaagaccagcctggccaacatggtgaaaccccgtctctactaaaaatacaaaatccgctgggcgtggtggcatgcgcctgtaatcccggctactcgggaggctgaggcaggagaatcgcttgaacctgggaggtggaggttgtggtgagccgagatcgtgccattgcactccagcctgggcaaaaagagcgaaacgctgtctcaaaaaaacaaacaaacaaacaaacaaaaataactctgctgctgattggcttgtgtccttggccaaaagatttatgtactctctcttggcctgtttcctcatctgtcaaattgggataatatttattgccaactcatttggagggtttattaagaagatgtatacaaaagcaccagcagtctctggtacagaggaggcactcaacaaatttcagttctccattgcattggacgcactcatctggctgactcctagtggccaagtagcctgtgctctggctgcagtgctccacctctgccttgtgagccagcttccagtctggctggcccaggaagagctggcctccttaccccagagctcggggagctcattatgctgagttgctgggcttcaagagagatacccatcccctcagactagcagatgaacagtttgttgcctacctttcccaggtaggctgttgcccagcctgttggcctggggaatcatgtattccaagtcaaaaatttctgtcccgtgtggtttgattcataatctgaggacggttccaaatctgtgacctcatagtgtttgagtcagagtgttgagattgccattcttgtgctgagcttgggttgcccaagatgatacaaaatgttcagaccatggcaggatatcgtatattttccttctgttcatttggcccattgctttcctggttgctgtgtctattctccttgccacaacctttgtagccagtgtctaccatgtgccgggattttggacctcataggacattgccctttgccaatggaaaaatatgtttccctggactttaggaaatgctcctgatttttgaggtcctttataattcatattacttctaagtgggtgtcttgcctatcatctttattttttaccttgtttatgcttatgaagtgtttttattagtgacaggtttgttgtcaaagccctgggttatttggttatagtctgctactgttctagtgatggcaggactagtaataacctccctggtctgtcttcacaattgggaaagaacaatcttcttatttacattccagagtggccagattgtaattttggaacagcccaggaaagatccatctcacataagattcctatgtaatcattcaacactctttgcacatctactttgtgttctagctcctgtctaggttcattgcagtgaagtcttgtattggaacatgttgaaaactgggctgagcattggttgagcccagaaagtgatctagaaattttggctttgaaaaaaatatattgttaacttaagcgaggacctactgctttgtcttttaaaaaattgagaaatttcgttctttgaaagtatccattcacttttctctacatggaaataatgaataatggtctctatgggcaaacacatttgagaaatgtagctcaccttgtctatcaaagcacagtgggtggtattgggggtgcgctatccctgagtagcccagcatcagcccaggcccatccataataggcctgtgactctcatgtagcagtctcaattctgtgttgttgaacacacaacttaggtgttgccttatgtgctgtaaatgaagccagagctgttcttattgccatagtggtttctgatttcgagatctgtttttgcttgcaggagctgctaagccgcacatctcttgagacccagaagctcgatctgatgactgaagtgtctgagctgaagctcaagctggttggcatggagaaggagcagagagagcaggaggagaagcagagaaaagcagaggtaagggtgagtgtgtactgtcctaagctcagacctgggaaggctgtcataatgtgaatttaggccatctggtcaactcccagcctggaagctattgggtgccagaaatatctatacactagagatgcagtgatctgttaataccaagttatcaggttttgctgtggctgcaaatttcagcaatatccaaaccagccagttttggctctaaggctttatctgccctcaaactgctgacaaggatggaaagagaagcaatagttggggaagaataagacaaaatgtggagggacacaagatgtcttctgtgagaaccaaggaaatgacgacgtaccggaatgaagtcagcctcccaataggccattgacactggatccaaggagtctggaaacgtttcttgacgtgcgtttcactgacccagatggaacctcgggtgatgtgtttctcttttcctgatgggtcttatggagcatgccatgtgcaggccttctcttagagaatgttttcctaattttgtttttcagtctttgtatgccattggctggaacatgccagactcttttttaaataaatgtttagagaattttacactcagagctcctttgagagcaggcagcctgttttaaccttagataaccgtcttcctgtgcctctacctttaagttcttcttatattcacacctagcaatgagagatatgaaagaagataggttttaggtttagaaacaccttgctcatttactgacctaactgcttaatagttctatgaacttcaagctggctacttaatctttctgaacttcaatttctttatctggttaaaatggataactgtgtggtaaagtccaaataaaatcgtgaaagttaagtacctgtcatagtatttggcattttgtgagcacctggtatgtcttcatctccttccttcatttaggctaaagatggatattgttcccttctgataagtgccagcattagtgcatactgacatctgccatgtttgctgagtaaacacactggtgattagaatatttctaatgtgtgagcatgttccttgcattgcttttgagaacatgttcattaattagaagtacagttgccaaaagaagatatccccaataagctgagaacagtagcttgtattgactaagagtccaggctgatgaatcagatctcctggctttaaactgagctcagtggctttgtgaccttggtcacgtaatttaacttcccagacctgtttcttctgtaagatggaggtagtaatacttccaatttctttggttattctgaggagtgaatgagacaatgtatgtggaacccttagcatagtaatagttagcttttattgatcacttactgatagtattgttaagcatgttggaaatgaaaatgtagacatagatacattatttacatattgcaaagtttatacagcctgaaagctaatctgtgtgaagtgctagttgaattaaatgttcagggagaagtaactgaattttcttctggtttgaagtattttaccgatgtttcaacctgcacaattgtatgtgaacacacattaggactttgggggcagaattccataaactctgtgagaaggcttaaagtggcagacactcaactcaaagtcacttaagagaaaaagggaggagagagacctatgtcacataacttgaaaagtctagtgtttgaaagaatacaatatgactagatccgggtaatctcacagtgtcactagaaattagtctcagttgtatcacctggttctgctttagccttattctcaagaaggttctccccaggtggtgacagagatagccatcagtagctccggaatgatatcctgccagccaggcaacttctgcagtcaaagaggtgctttctcaaaggttccagcaaaagcctcaagattgcatctcattgggccactttgggtcatatacctggttctacaccagtcaccgcagggatctgtgcatgaggggtgggaggtgcgaatatgaaagtcagcccgtgtgtggaagtatacagagttagcaccaagctaggataatgcagtccctttacagggacatcagaaaggaaggagagctcccacttctgggacaagaagcactaatgcagtcattttactgtttgcttttttctttcttttctgaaggactatttttaaatctgaattttttgtttttgtttttcatcagtctgttcatacataaggcgacgtagaccctgagtgtctggcctcagtcctaccagataacagcccttcccagttgctagtacaaatattaggtttccacgtggaggaattctgtaggctgttcaaacctgtgataatcagtgagcagccacatggcctgaaacaaattcctcgttcttgtaattgcacataatctttgctggtatgcacagaacttctacctctatttgtgagtgtctggagcaaccaggggtttaaaaccacagggtactgcttaagctgcactattgtcatgtgcatggagatgtttattttgagtgagacattttgctaaggtcaccagaggttgtaattgcatgaataaagggaacgctgcttcccatactatactgctgctgttttttccagtgagtgtatttagcctaagggctcattgtgtgtggtttggaacaggcaggattcttttttttttccccctcaggtgtgagatagccagatctgaaatacagtttctcagcttagctcaggctttatcctcaaattctgttttatgttttaatgaaaagaagagaatgcttgtggcaagagcattgccaccacaatgtcactagaaattnnnnnnnnnnnnnnnnnnnnnnnnnnnnnnnnnnnnnnnnnnnnnnnnnnnnnnnnnnnnnnnnnnnnnnnnnnnnnnnnnnnnnnnnnnnnnnnnnnnnnnnnnnnnnnnnnnnnnnnnnnnnnnnnnnnnnnnnnnnnnnnnnnnnnnnnnnnnnnnnnnnnnnnnnnnnnnnnnnnnnnnnnnnnnnnnnnnnnnnnnnnnnnnnnnnnnnnnnnnnnnnnnnnnnnnnnnnnnnnnnnnnnnnnnnnnnnnnnnnnnnnnnnnnnnnnnnnnnnnnnnnnnnnnnnnnnnnnnnnnnnnnnnnnnnnnnnnnnnnnnnnnnnnnnnnnnnnnnnnnnnnnnnnnnnnnnnnnnnnnnnnnnnnnnnnnnnnnnnnnnnnnnnnnnnnnnnnnnnnnattgtgtttgctcagagatgagctggcctaataggagagtttttttattcttgtttttattttcctttatttactcatttgcatcagtgtaggaaatatactcccacaattcaaaaatcaagtgttcaaaagggtatatagcaaaaggtctctttcaacacctgtcctccagtcagcagtcaggaagcagtgccatcagtttgtatccgtccagagttatattatgtgtggacaagtacattcatgtggatacacacagacacacacactttccctcatttttatacaaatgtacactattctagacctttctttttaaatttagcagtcttggagttctttttacaccaagtatgttttttaaaacttcctcattcatatctatgtctgcatattgttctaccatccaacaatagcctaatttatttaatcagtcgtctctcagtggacatttaggtggtttccaagtttctgctattacaaataatgctgtagtgaataatcttgtatatatgtaaagatattgatgtggaatttatgggtcaaggagtacatgaacttgaaattttgacagatatttccaaattgccctctctagaacatagaggttatattcccatgagcaatgtaatgtatataaactgagcctgaaaaaagaaagaactaagtaaaattgtgtacaagattaacaggtaagatggaattggaaacaactgtgattatgggaggtgcccagtagtttcacatagaaaagaaccataaagaagaactttaatggttggcaaagtgtgattaaaaaacaaagtgagctgaggttaaaacacaggacagcaattataacctcataaatgccacctagacgtcatgatgtggaacccagaatggaacagagctacaaaagggtctgctttatgggagggaaacagacctgttaggaggtgggccagccctggagataaagaattatgaagctaggccaggtgtggtggctcatgcctgtaatcccagtactttgggaggctgaggagactggatcacttgaggtcaggagtttgaggtcagcctggccaacatagtgaaaccccatctctactaaaacatacaaaaattagccaggcatggtggtacacacttgtagtccagctacttgggagactgagacatgagaattgcttgaacctgggaggtggaggttgcagtgagccgagatcgtgccactgcactccagcctgggagacagagtgagactccgtctcaaaaaaaaaaaaaaaaaagaattataaagctaagttgaaatgccaagcctgtggacagacataccagaaaacaatgacaacacatggctcaggagaattaaggcagagtagcccagaagttttgggtacaccacacactgagcagagggatgaaaatagatgtgttcctgatgcaggtctccaaactgactgatgcacacaaggggcagtaatggagggaggggagtagcaacctatttgttagctcctaaatatctcccagctgaattctgaagcatttgaatgtttacttgtttgtttttctcacttgctttcactctactcagagggtagaagacaaaactaggaaaactgcctttctagctccaacattgaagcaaaaggagaaactggtttatgaagtaaaagtgataggtaccttgagagaaagtggtcattgttatttgaatgttcacgagagtgagcatggaaaaactaggcataaacagacatgcactgtagacttgggtaaatcataactctgacaatttaaaaataaaatggatggggaactgtcgaatagaggaagacccaagaatattgaactacttaaatataattctgactgtgcaatctcacagataataccaataaaaaggaagagtttagaggtctcttgaaaggaagtagttttcagaggggcttctacaaaaggcagaaaggacatatgctaaagacaaaagtgcacctgcatgaccagtgtcaggaaggggacatccgaaactaaaggacaatgctgaggacaacacaaagccatacacacacatacacacgcacacacaaacacccacacacagttatgttcttaaaaagaaaaaatggacttgattccatggatgcctctgacagatacaaaaaatttaggacaatagtcccccaaagtgcttgctataagttaattttaaggaatcaggaaaatcaaatgagttgctagaaaactggaaatgaaccatttccttcttgattttcaaaatggcaaaagtttgatagattcagtaaattttagtctgttgagtttggggccaactctatgatggtttgcaagaagggaggagacaaagtagggatccgtgtcctcaaggagtgagtctcgtcagattggccttatcggtttggccgggaatgtgtcgtgtggtagaccaggtaaatccacatttcagtgaagtgttgcaaaaacgttgcttgagataatcttgtagacaggatggaggaatagaagatgaatatactgaaataggcatattgatgcctgagttcagggtttgggtacatattgtcatggataagtgtgatgtgtgccatatgtcccctgtgcataggtgctgacacgttgggtgtttgggtaaggggagtcggtgtgtgtatcatgcatatgtggagagaggacgtgtttgtgtgtgtgccccagtgtgcacccatctctgctattgcttctgcttggatgaagagtttcttctagactccatgcctcggtgttgacacaacaatatggcacaaaggagctgttggggatttgttcgaactgcaagacaggcatctggatggggcaggcctgaggaaaaatgccatgtcttttggttctgttgtggaaagtggagggccgtcgacagtgaccactgagtgccacctgctccctgccccatgcacacttcctctgtgctgttctcttaaggagttctgcgtctgagagctgtctgacctggagtgcttttctcttctttcttttccttcctacagtcggttctgaatgtgatcagtgagctgcaggagcagatgtgtaggctgcagctggacatccacaggcagattcaagagcgcctgttactcagtagggaccaccctgaggaggtggcggccagcgacggtgtggccgagccccagccctgcagccaggactgtgcctgttgggaggggtcacctgtaggaaccacacttaagtatatcagagcatgcgtgtgtggggcatttcactggtggaggggctggggtttctcctaaccagaacagagtgcagtggcttggcatggatctgttgttacctctgggcagagcttggactcactcaatcctcttgggatgtgaggtgagctcagtgaccctcactgagcagggtctgagcaggtgaggccaaccctcaaacaggtggcactcatctcctttagggctgggaatgaggtgcaccaggtgctccgagtgatggggcatttgtgccacaggaagcctcatgattccccttctcaggtatgtgactcagatactgattcctcttcccaggctgggagattaaacaaacttttgtttcacatgattttttttttaaggaaaagaagtattatgaaaaagaatcctttcaagtttatgttcaaagaggtttacccccagtgaaaaaataaaatacaagttttcatatgctgtgaataattaagtcatgatctgaatttccaggaaaaatcccccccacataatcacatcagggtgattttataacaacagggccatgtggggctctatctgactgggattctggacttggctctccacacggggggtaacctggtcctctgtgactttgctgatggcaggtgatggcagcttcagcagagataaccctatgcctcgaaggaggcctcctgttgaagaggacttggaagccccccaagaaaagaccgaggtcacagcagccatgagtactacagaggataccctggctctgtaggaagttactatggtccatactcaattagggagcctgttgaaaatctagacataggtgttgcgggaagggatttggttggaaagatttcctgctgcattaaaggacaggggggaaataggaaagtcaagatgtaaatgtagacttggatagagaagccttgagagggtgttggcgcatgacctatgttgagtaggttactccagcaagacttttaaaggaaggaaaaacgtgtgtgtactaatgttggtagtcaatgatggacaacaagtaacatagaaggaagaggatgttccagaggtcacggagcctggagaggatgatttctgtatacccacagtggcagcccctcaggcagtaggaacctgcacacttctgattctgatatcagctggcctgacaccctctccaacaaactgagtaacctggctaggatacaaggctgagcagaagaaccctcaacttgtgggcattggagcctctcaggcagggccaataatgtcctcagagaatgattctgggtctgctgcaagtcaaagcaggtatctgaggccttgacatccagtgatgcagatcatggatgcaataaccttagctgagaagttttctttttcttttttttttagctgggattacaggcacttgccaccacgcccggctaacttttgtatttttagtagagatagggtttcaccatgttagccaggctggtttcgaactcctcatctcaagtgatccacccacctcggcttcccaaagtgctgggattacaggcgtgagccaccatgccatccagaagtttttttttttttttttgtcttgtttttaacgggcatcagcatatgctcacctcaactagaaggcaatcttaaaaaatgaccctacaaaattcaagggtaagcaatgtcaactttgtggtggattatctcagaaggccaagacctccaggccagttaaataatgacttaagtttcatgtgtgcattcattgacaaatagtatacacctactatgtgccaggcactgcaggataatcagaggttagcaaatacctcatggagtttacagtttagtaggagagctagctattagctgtcatacaaataaatatttaattgcaaattatgtaggaggtacacagagtacaacaagagaatatagcagaggggcctgatatagtagggaggtcaggatagctttactcagggagacctgaaggatgggcaggagttaacctggcagaaaattccagacagagggaatgttgtctgcgaagacctaagttggagagaggaactgaaaattatccatgtggctagagcataactagggagaaagagtgatccaagaggcaggcagggagctgtcaggtcacgggttgaagtttatgagctttgagaagcatgggagtgccatgatctgatgtatggtttgatcatatcactcccccagatgccatggggtcagttgctttgagaggagcaagacaacagaggagcaaccaatgaattgactgtccaggctgtcagtgctaattgctagaccagagtggtggtgcctgagtgggaaagaaatgagacattcaagttgttttcctggaagtagaattaataaagcttggggacgaattgcatacatagaggaggaaggacagggagatgcagaggatagatcctatgtttctggataggccgttagatagatggatatggcatttagtgagatgagagtaactaggaggggagttgagcattccacttggcacctgacagtccggaggtgcctatgcagcatccatgtgatgttaagtaggaagtttgttgtgtgagactgcagttcagaaagcctatggaaataattatctttatgccaattcttctgatgggagctagtcagcaggaccaattgtctgttaaggaaatcttggttcaagataacagtgcttagtggagtcatctttatagaaggagtagtttcacaaacaagggtcctagagtcagaatatatgggcttgaattccagctccaccacttactagctaaatgagtaagagaaaattgtttgtgtcacttccccactcagcaaccttcagtgactccctactgcccaaagaatggcatcggaactcatcatatgtattctcatcctcaagcctttaccttagggcctcaccttaacttcccagcctcatcttccactgtgtgcctacaccctcagctctagccgcatgagttatctccctttctgtctcctatctttactcctccctggatgccttctccctcccttctttcttcaaatcaatctcttcctctgaactggaacacccattttggcatctatatttggcccttaacatttgttcccttagggttcctctatgaggcctttcaggatcacaggccccctcttctatcttccttcactcccagcacagagagatgctcccaattagcctgctttctactactttgcatcacagggaagaagctgcctcatttcagcatctctattcttcccactccgaagcctcgcctgcctgcctatactcatgtgggtgatgttggcataccccacagaggacatagatgtcagagaaaggggcaggcagaacaggttctaaaactaaaaggaaagttttcactttcttatgtctggaactccctggcctttgttttttaacggccatacagctttcctgaaacaagggacatgtttaaagattaaagctgttatgtggagcttgatgtggttgctgcaccccatatgcatgagcttaaccaggttggtaaatcaagagcacatcttttaaccatcagaactttgtctttctccctcatcccctaggagttactgcaagagctcaggcacctcaaaatcaaagtggaagagttggaaaatgaaaggaatcagtatgaatggaagctaaaggccactaaggtaaacggcactcctgatgcttatggagagagtatgagggccttgtggggagggtctgcattccaacttgggggtttccagtagcctaagtttgaaaatgcaaatcaaccctccagtgtggacacacagcagtgcccagatggtgcagcagacagacttgatccaggaaagatcctcatggagaatgcccgtgagattatgaattggtcaattgtagtaacccagtctgcttcctctccctgcaccccatagcacctggctgaagctgggccaagaaggggctaggagtggggagagcaggtgagtggcaggcagtgaatcatgcgtcctaaagcagatcttggatgcatcattttaaattcagtagtcccttctagaatcagtttttcaaaaaaataggcatgctttatatttggcacaaaatatattcctaaaaatggcataaacttcgaattatttcttcaatcaaatcatgtttctcttaaactagggagcctgcaatttaaaggacaccaataataaattctattgtgaaataaatttcttccctgtcccctttgtttcttccttcttttcctatactaaagtgcagagatcaaaactagtgggttacattcagcccatgaatttttttggcctgcacattggattttaaaacgttaaattgttatttaaatttcaggaagtttacattaggctacagttaggtttcctttgggagtatggggaggtgggaggctcacacctgccttcccctactgtgtctgcagtgccacccaagggcattactggatgtttttattagagttttcttaacttctagtttgtatttttattttttgtgcaagttagttgctaattattataaaaacaataacacacactatagagaattttcaaaccctaaaaaattaaaggaataaaaagcactcataccacccaggcactaccattgctaatatttccttccgtgtattattctcttctgttttaggtctgtgttaggccattcttgcattgctacaggtaaatagcttagactaggtaatttataaagaagaggtttaattggctcagggtactgcaggttttacaggaagcatggtggtcacatctgctcagcttctagtgaagcctcagggagttttcaatcatggcagaaggaaaaagcaggagcaagtgagagaaaggagaggaggtgccacaaacttttaaaccaccagatctcgtgagaactcactcacagttgcgaggacagcaccaagagggtggtgccaccattcatgagaaatctatccccatgatccattcacctcctaccagggcccacctccaatatcggggattacaattcaacatgagatttggcaggaacaaatattcaaacatcagggtctctctatctcagtgtctctgtctcttaatttttattgttgataatttacatgcaattttataacatgctgttacttaaaattttatgacttctcatgttatcaaaagaaagcactgaacatatataaatatttatgtaatctagtgtataaatataaaatcatttgattaaccattttacagataatgaaatggatgtacagagagattaactttcccaagattttacagctatttggtaccaagcctgggcagtcagacccatctgtgtcctggcctgtgtgtatctgagtgtagttttgtatgtgtatgcttcacaggcaccagctctaggggcactggttttgtccagtagctcagaaccttccatcacaacaccccactcaaacaagccctgtcttggggaaacctttgaagttgtacataccgccctctgtcataaaaccaaataacacttttctttttaacaccccagctctttgtcttggcatgtagacctttgagatgctaagggttatttaataactaccaggtgtggagcacttcctatgtgccagaatgtaccaagctatttgcacacattttatcatccataaaatcacccagtgaggtatatgtttttttattctcacttgactgggaaggaaacagaggctcagcgtggccaagctgaggttcacatctgggtctctgtcattcccgtgccttcatgctgtttccaacatcatcctgattccctgcagagaaaaccagcactgtttttggaagtttttcacttttctgcttcaggcctctcagtctctgaaggggattcatctcccagtgcaatggcagtagggcatggtccctgggtttaatgaggcacagcacttgcagggacccagagcatccgtctctgcccaactgcctgtctgcatagctatctcagaccttgtgccacacagccctagccatggtgactgtggccataggaacagtggcagtagcatacacagtcaagtagaaggtctctggactgttcttggccttcccaactgcggagacagagatcgctcaaaggataacagagcacctatagtttctggcctatttctgtggaaattggcacaaggcaggttgggcccagtcacttggtctgtagggtccatggtatatacctacaggacctcccatagaggcagggctcaggaaggagagccctcatagtgccacgtgctagattctctcttgatcggtccacattgctgaattcccaactgtggggccagcagacaagcatcaggtatccagatttctaacagagacgagtgcccatcctgtccacaaagaaagggagaaatgggcatggagaggtgcaagaaaagttaaaggaatatctttcaagaatcatctggcctttgtagaaatggaggttgagagtcccaaagctaatatcttcagaagccattgtcaccatgagtcataagcccatgggcatctttgccctgagtgagctctgataaactgctccatagctgcatgtctcagaaagtgggttacacagcaggacccagctcttggcctctgtgagtggagcccagagtggagggacagtgcttcattatgaactttggaataaggaaaccctaccccttgtcatctctttatatggtcatccctgtcccatttgggggatgttagggaaggttattcagaaacccttgcggtgggctgagggagcccaagcctggtaagagtggccttcatctgtcctgttaactcagaagcagacacacggtggtgggtggagccctgacattggagcaggcaggccagggtttgcatcctggcctggtcaccaagtagctctgtgactgacacagaatcttgtactactcccgttttctccctgatgacttacggagatattgtttcctcgggtggttgcttgtgaggatttgatgtaagaaagcagtgagcacgggggctgatcagggtgcgtgctcagtccatgcgctgaaactgaacacaaggcctgtccagcaacagagttgccaacagggccagtactcatttaattacttggggttggtcagatattaacttgggcctttgtggaattgaacagcccatactataaccttgaggaccaaagtgggacatgattgggccaacacatggggaaggggtggccagaggagaagcctttgctgtcttttattgaccggctccacggtcgatgctcatcccttttcttacctggtttgatgctgagagaattgaaccgattatccacaaagaaaagaataggatgagaggagcaaatagcagtagcatttattgagcacttagtatatactaaatattggactaggttgttgataaccattatcttaaacctaattgcagtcccatgaagtaggtgtagtttttcccattttatagatgagctgagactcagaaaggttaacttacttgctcaaggtcacccaactaggaaatgagagaatcaaggtttgtttgactccaaaatccaggtacctcttcggacaggacctatacaattctgatctcctgatgagtatgggaaagcatgaacaaccacacctagtgttgtgtgtggatttaacctgcactacttaatggcgacatgggaaccatctagtgcagctgcctgtttgtgtgcaaatatgaatgtatgtgtgtacttatgagctgtgtatacaatgtttttttttgcaaaagtatgtaaatgaagcactcctgaatgcttgtacatctgtatatgagtgagcgtgcacacatgcctggaggttgggcagaggcagtgactgtacccaaagggtaggagcgtgtggagggagggagcccttggcttaccttttcttcagcagtggtgatttggcttccgctgcattttctctgtgggttggaaagatgaaaactgcatgcacttgttatagtggtgtctctaaatgttactgtatgagtgagtatcttgggagaagaaagaccatgtccagaatatcctcctctgcaccaaggacagccctcccattgcacacaatcccagctcctcatcacaatcctaatcctcacagggcaggggagagaaactggtcaggtaggaagatgcaggggaagaagcacattgatggccagagccgtggggagggccaggatggcctagaagagtgagttcactcagcagagttccacctgtggagagggcagtgagcccctgctactgctcacctcttctcctaactcctgatgcaccctggtgcctgatggggtctggactctgacgggaggcacttcatcatgatttggcagtccttctgacctggtagggatcctctgttgctcttccaggctgaagtcgcccagctgcaagaacaggtggccctgaaagatgcagaaattgagcgtctgcacagccagctctcccggacagcagctctccacagtgagagtcacacagagagaggtgactagcttgactctgacaaaatgcagttgtctgggtccctgggtctactcttataagtgagcatgtgtttctataaatgagtgtgcatatgtgcttgtgtgtgtagccatgctaatggacatgcatgtatgtgtgcaagcgtggccaagtgaatggatgcaccagtttgtgtgtttgtgtgtgtccctataatgcagcgctcttgtggaatcattcccatggaaccctcccctaactagaaggtttttctcagatgcacagaagttctgtgcagccacctctggagcttttactgaaaatgtaggaaatacctaactctttcatttgactgaaaggccttacttttgtgtcatcaccaaaggggaggctttagaaatttactcagtcatttcatggatacctgcctgatgcctgtataaggccctgagactacagaaacaagtcagttctttttcattcttgagatttcaaatcttacttctcagaaagacctttcttggccaccctaactcaaataggtgctcccagtcctattattctctaattcatcatccttcctttttcctgcctagcacttattataacttaccagtgttgtgtgttatccccactcaggggtaaggactatatttttcttgtttaagagcatatctacaaagcccagcacaatatttggcccattgtaggatcctaagaaatacttcttgaataagtgaaaggatggtgaatggtccctgaggagttcaagtcttgctgatcaaaaatagaggataaatcctcaactactgtaatgaacacataaatctttatggctgtttgccatgtatacaaagtgatcatacacctttcaacttgtccactgactaccaggctgcagagcaatgccgaagatcatatagtcctacggattggtgccactacctagtcacatcctggcctcagcactgcaagcttagcttggatccccagctggggtgtggaagccatgcaacaatggcttaggctggagaaggaaattagtgatcaatgtgctcgtccctctccgagcttttctcagtgtccgcccaagccactgggtgtgttgcctacctgccaaggcctgcttgtagaggctgggttctactaagacaccctggactatctctgatgctaagcctggacagagagtgccccatgccacaacttctaggccaggcagccttcccagtctacccctcctcttcccacagtctaagcctcccaggccctaccccactccattactgggtactttctagagctggtccttgggtcatttgctgccgaaggtaggttctgaccagtggatcagggttggcagtcttcatctagagcttactgccctccccagcaaagtgagctgcagagctgatgttagctacctagagcctaaataatgagcaagcaattctccactttattctgaaaatgaatctccacaactatttacacaaagtccatagatctactgttgctattcttgttagatacaacaagcatcccaaaagaaaatgggaggcctatatatttgttcccttgtacttttttttttttatatagacatccctattcccatttaggaagaggcatagatccttctttgaacaatctagctatgtgccaattcctagagtatctggcaaatgacctccagcttccttaggctcttcaaaacagttaaggaatcaacagagtccctcttgggtccaaactgagagaaggccttggattttccaccacagaccaacagagatttctcagcccatagggaaattctggtttatgatgaaataagattgtttatcctcaacccagcatttgcatatatgtatatatcccaatacatctaaacatttgttagtcaattttgactatatcattttaaattaagccaagtaccaactcttttacataatttttatttcccagtcttcactcaactgtagatttttttaaatgttaaattctcctcttcctacaatttgtcagactgtatgattttcttcaaagccagtcagaagcccaggtgcatgcctactcaagttgtaaaggataaaaatgtctatattcttaggagatgttggttttgaaagatttttggcttcctctgtcctctcgagtacatgggcattttgattttgcccataaatgtctataaagagaagacagagtactagcttccttcatttagtagtctagcaaatatttaaggaggccgattctgtagcagacaccatcccggcctctttaaagaactaaaggagccatgttcacatggcaagtcttcatttgaacttgggggacatcatagcaagtgcggatagctgtctgtatttatataaataattatttctatacctgaattcttttagaccaagaaattcaacgtctgaaaatggggatggaaactttgctgcttgccaatgaagataaggtaagatggtcattgggtagccctgtcttttccatgcttacatccctggctgtgtttggtccgtgctggtctctgatattctggacaggaccatgcttatcatgccattgacatagggatatgtcaggagaatgacttgtgccttctagagacttggcctcagccacctgtttttggctttgataactggaaagtttgtctaaatggaatctcctaaaggcagattatagccctgcctgttcctgctggtgtggggggaaaaaaatactgctgtgatcactgccaatatcatagctcctgctggaactcctagcacaacagcccaccagtctcccatgtgcatgatctgacaatagaaccatcatagagacacttggcagtatgcagtgcctcagtttaccctgccatcttatatccttcgcatctaatttcggcacagtcataaatagccacctctataaataaagagtgcctggctggtataaacatcatctctgaggatcacaaccctgcattttacagatgaggaaacagactcagagtgcttaagtaatttggcccaaggtcaggtaactagtaaatagcacagccagctttcacacccaagtttgtctatgacctgtgtggtctcccaagttcctttcaaggcctttgccttgaaagaaacgatcttctctgggaatttcctctgtagtatgaggtatctcagactcctagggaacaaatgagtatattgagataaatatgacagctttattttagtctttttttgtgtcgctccagagggcaacactaggaccagaaggcagatttcaatggccacttcaggaaggtagggagacagtgagtttcgtgcttctgaaaatgtttaagccctgtgaagggtgtctcagatgactcacagtcttcaggtagagcgtgaatgcctgcagatgcctatgaggcagaccactgaaatcccagctctgtggaatggggcctggacactcttttcctttggttccacgtgggatttcttctccttgtgcccagaacatagcgtgggttccaaaatgaaatcatctgagatgccagcatagcattaatctaaatctctacttgcactatggcaggaccgtcggatagaggagcttacggggctgttaaaccagtaccggaaggtaaaggagattgtgatggtcactcaaggtaagagcaagggcgatcctaccgttgtctctgaaagatattccatcagctgtgttaaagccaggggcagttctgctagcagctgtttcacctctgtttcagagaagactccctactggagaacagagctgtttagacttttctgcatgatgagaacttagcagttgttgatttccagaaatactaccaaatggaagtcagcttagggccttcagggactatccagatcaccaagaatataaagcttgtgaattccccacccttggaaggtctcttatgcatcttcccaggacacgccttagaggcagcaagtgcagttaaacctggatcaaaaatcaactcagtgccatcattggggattagagctcatccacctcctagaaaatctaaagttccgcagcagactcagagggccctctgggagccttcctcgagttgctgggcctgagttgctataggaagtcacaggacagagagagctgctgtgttttatatttgctgcccagactgaatgcaacatgcaagcagcatcagggttcttataggcatagtggtgcatgtgccgggctgccttcattgttcatgccattgacctgggctcccatcatagatcctgaggaagcagctgtttcacagcacagggctgctttgaaggatattcaggaacctctgattctggctgagcttctgctgcttcttgggaagaagccaagcctctgccaggatgtgactgactggtcactggccagggcctctgccagccctcacacacagccctcttttttttctctttttgagatggagtgttactctgtcacccaggttggagtgcagtggcacaatctcagctcaccgtaacctctgcctcccaagtttaagcaattcttgtgcctcagcctcctgagtagccgggattacaggcactggccactatacctggctaatttttgtatttttagtggagatggggtttcaacatgttgaccaggctagactcgaactcctgaccttaagtgatccgcctgcctcagcctcccaaagtgctgagattacaggcgtgagccaaagcacctggcctcacagccatctttttaagatcatgggtcaagtcactctcagggccttgattgcctatagctaaggagtgagaggtttggaggcaggggtacattacctctgttctgcagataaactttgaccttgaaatgatcctgatgccagcccttgctcagatgccctgaagaatcttcagaatcacactcttactgtccctttatatatttcttagtccttcttaatgaaggagaaacaatgttagaattttgtggtacgattataggtttctgaacatgaattcaacaattcagtcttactaccttaatgcttgcagggccttcggagagaactctctcaatcaatgaagaagaaccggagggaggtttcagcaagtggaacgctacaaataaggaccctgaagaattatttaaacaagaggtactgtgtttccatccatgacgtagggtttcagcaggtcctccgagcttgccctgagcttgagggaggatctagtcagacacgtgtcaggtgcacatcttggcaggtgaatacttaaattaataaagtgcccctcaggctgtgatggggatgggcgagcaagaggctgaggctctggcctgtgctctggttggaggcagcatggtggatactggaactttcaaggataggagttctcctttttaatcaggctcctagtttatttttatcttttttttctctggaatgtaagcatagaccaaaggtgatgtttgatttatctaccaccctttctccaaggtctgcagtaatgcccgatacccagtagaattcaacaaatatttgttgaatgaacgaacatgtcttgctcatttagaggaattaactgcaacctctgaaatgccgcattcctgcttgacagatacgcccttcagcccctatagccaggacacagattttccttctcatctatttcgtttgtttaaaatctggtcctattgtatgaatctctctagacttaagctagatacaaataaacaaataaacaagacctcaggtgaaggaggggcttcagcctagggtccaaaagattcctgaaaacgtcacactatcaaattgaaaagaatcttagtgcttcagttcaacctttttaattaaggagcaaaagcatcatccagtgagccagttattgactcagaacaagcaccccagattgctggcaattacagaatagcggtgtccaagtcttaccaagtcttactggatacctccacgtggtcactgtgatgaacgttgtatctggcagaatatggacttgaacccaggtctgaccacaatgcccaggtatttaaaactatactataatgccagcgttgttgttatagtagaccaagaggatgctaggatctagagaaaagaggcagtactggagacatgggactgtcttctttcataacctccattagctcaaggtggctccgcctgtgatgctaggtgcactgctgaaggcacagtgttgtggtaggtacaatactgaagacacgggactgtattatttcataccatcattagctcatggtctttccccctgtaatgttctttcctttcttgccttaaccagttctcatttctcaaaattcagctcagcttttctcctctctaaagctttctcagccttccctctggtgagagggagcccctctctcccactgttcccatattgtgttacaggtgttggagccataagagcattgcacattattctgttatcctagtgtacttgtctgtctcccagatgtggggagtgcttgctccagacctggcacagggcctggcagggagtagatgttgctgatgtttgtcgggtgaccatatcaaatgggattttctcattgaaagcaacaaaatttggctctggctaacctaagccaaaaagaatgtttttaaaagagtctgcagtggctcgctgaatgaaaggaaaagctgaagaaccaagatcagaaagggaaggagcagaaaaagcccaagaacccaggtctcaggactgtactactgggatatgaacatgatctaagctctagggtccaggaaggagaggcaagctggcccagatggactgataagcctaccacacccccttgcatcttgaaagagcaaggcatctataatgatgtatccaccatggctgcacccagggaggaaatgtctccctaaaaggaatcatgtgaagcagggggaaagatggtgggtggtccccaaacagactgtcctctaccgtgactcttctgtctctggtgcagatgcctccaagatgtagctctcctacagtggggccacctccattgccacagaaatcactggaaaccaggtaagaggcctgggcatttccccacagccactgtgctctcaggcttgccttggggctgccgaagtagatggtgatgaccgtgaatggtgagcatggccactgagtcctaggtgcacctgcccctctgttgttagggcagttacaaaccaggcctacctcttttggccacagaagggcttctcatccttcaggctgagggtgtggatcattgtcactgagaaaggatctggccaaggattagagcctcagaggagaggtggctgcaactcatctgtgtcttatagcagctcctcagagctgagagcatcccgtgatgtgtgttccttttgtcagcctctgcctcctgctcttagagtgaatttagccctttgacagtcgaagctttctagggaaggccatgtcttctcatagcaattggtctaattgctttaaggatgcttcacaacaatgaactaataatgggctcgcctctgaggtcatttgactgccatctgtcttgttccctctaaaataaacctaaatctagttccctatgtctgtactttagcacacattttgaaattgagccccatgtaagggagacatggaggcttcactaccaaggtactggcaaccactaccaggctgcctttcagctaaggtgttggggcagatgaccacaagcatcacagaaactccccagaatggtgctgagtctccagagcctgcactctgagtccactttccagaaagcagttgttcccttgagcctttagcccagaggaaaatggtaatgttagagaagttgatcaggcagtccttagttttggagaataagaattgtggtttatgagttcactgagggaaaggtcaacaccaaggaactcggactgaccagatttacaagagactaatattttttaaaatgatgacttactcgtataatctgagaaatatgactgccaaggagacttggcacaggttacccttgtgaccactggtggcattgcctcttgacacatttggtgcctttctctgcaaaatagaccctgagagagccagatgagtctgagcagactagatgggcatgcagatccagagcagagtgtggcagggtcctagcaagtgatgttctggagccatggctggttaatgtgttcatctctactctaaggaggcccaggtccctgctccctggattactcttagactcagacaagcccagcatcagcacctttcccctcttttgacactgtagaccttggccttttatgaccgcacaattgtcacctcagtgcagcagaattgagtgtattctggctttttgtgcaatgccaagaacatttcatttggatttaagtgaccctgtcatgcccttactaacacattattggaccagtctgtcccccaaggtgggccagtctcattttgtatgtaaaggctattatgagagggtatttttttttcttgactttgaacctaagcccaagaccatcggttaagcatttgaaatgtcctctgcatgagtgataacatgtacctccttctcataactatttctttcttttgtgtttttttcagggctcagaaaaagctctcttgtagtctagaagacttgagaagtgaatctgtggataaggtcggctcatcaacctatccttaaagatgactgagttacttttttgggcctagcatagtactgggatatacaggcaggtcctggtccctaccttgtagaggattttataaagttgtagaggaagcaggaattacatgaacattttgagaaaattaactgggtgtggcccaaagcatcttagaggaaggacaattcaggaaatgttgcctggagttgatgagagaagatgttgagatcagcaaagcttggttagagtctgctgagcaatagcaggttttggaagatggtggagagtaggaggaggtaaggtcagagccatgagacagatcaagccagggaagatcttgactactagtcctatatccctggggcacttggggacatcgtatagatttttttaatgatgaattaatgtgaataaaggagatgatcccaaggaaagatgtgggatcgtcaggatgttggagagtgagctgttgtaagagtctggaaagatggaggagggtcttgtggctccttatataggagtagcccttgatcatgtgggtggacctcatgctgcaggggacagtagcaggctcttgagcttggtcattagagaccaagggagcctgccctgatagagacccttcagtgagcctgtgctgcataccatcccttggtctccaataatgttcatcagcctccttgttgatacagtggagaaccataaaggctgaagtctgcaggagccctgggatcattcagtggctctgctcccatggtcacgtgtctctcggttgccatggtcatgttgctggcagctgcccaggacatctgtccatggagttggacagggatctttcctgccctggatggtgattacttgacatgaagatgtggagggaggggatgcgcctttcagatttaagcaaacaggtagtcctgagttgttgctgtttgtgaataacacaagtctctttttctccacataaacgaaatcctcatgttactccatagtgtatggatgggaaccagcccttcccggtgttagaacccaaggtacattgacttcgtgccccgtcgtctatttgtggttacactgtttgctagtattttaatttagcaagtcatagttttcataaccttaaaatgtgccaactgtaaggagtaagagggcaagaggaaagacgcaacttttctctcccattttatttttatgtgcactcagctatttaatatgcttttgctatcattatctgtgggacaggatttattattatcacctccattttataggctcagagaaattaatctttaacaaagtaatctagatttaatcactgggaaggggattgctacgatctcagcacactgaagaacgtgacagctctcatcctttctgtgctgatatgtcatggttaaaaaaacacaagtgtacactcagtcccgctttgatgaacaagttatgttataaaaattccattaggactgattttctccagggaagcctgttgtggaagaggattaagtttttaggccagtgcacaaaatgttgagcccataaagaaatgaagattcatataattagcatgatttcagccacacccaaccaccatttataacattatatggaaaatgtattgtgaggctgatggcatttcccttctctgtcccctgcctccatgtccatatgaaacatggagcttctcattgcttgctgacttctgcctgagagggtcattttatattttcacatccatatggtaaaatggggcatctctgctcctccacatctgcgtaagagaaagatcttttctgcacgtctgcatctatataaggggcttctctactcttccatatttgtagcagttggttcttcaagtgggcagccattccttgggccatctgaactgtatagcaaaagtcttctgcctgctcccctgcccaggtgctctgcaacacagtcccttgagcctggggttggtgtggtccctttgtgaactgaaaggcttcctatggcgtcagctgttaaatcgctcagcagtcccccctcccacctcagcttcacagaggtcattcgcaggtgtttctaaagcacacctgtaagtgaccacctgctcctttggaaacacacccagctcacaggctcaaggtttaagacgccaatttgattaccaagaaatataagtgacgtagaactatttataaagaaaaaaatgctccagattaaaagattaattcttacatggttttggccataatcacaatcttatacaacctcagttattcaacatgaccaccctcccctctcacccacatacaccaccgtcctccccagaatagctacacaggtgcagaaccgctccacagtcatctttctgcagcatccctaactgtagtgtctggcccttgcttaaactggctcttgctttctgtgactgagagctcatttcattggaagacatcctttgtattcttttgcagctgtgtgagcttctctaaaatgtgcatctgctgatcctctccctccacatctagcccatggaaaaagtcaatctcccctactcctgacagctctggaatttaagtccctcatgccctctctgagtgctctgttctctgggctgaacatcaccttctcatgtgcatggatcacaagccttttaagctgctacttagtcttcttaggctcagcgctagtttctcaatgtattcttcaagttctgccctggaccagacttggagtgtgatattctagatgtagtctgaccagtgcctgccgtggtctaaggactcctcttctagattgctatttctttaggccctgggtatgtgatatttcctgtgcttctccttatccactgtccgctgtgtgctaggccctgtggatatgttatttcctggcaaacctgaggtaggaattgttattctccatttagaaatgaccagaggtcctgagaggtggaagagaaacagctctgtctgagttggtctgactcaaagcctaggccctttccactctggcatgctgcttctctgttgtaatttaaagcagctggataatcagttctacactactcccttggctggggcttctgttcccctacagccaggaggattgttctttttggagacaggagaaacagaactggagttgagcatccttgtttcctctgcgtcacgtcttgacattgcactgccttccacatcagtgagtcatttcttcccagcccttattcttggcctgagcagagctcagagagccctttccattgtccttgattcctttttgctgtctttcttacaggtcggggctgccttttaaaccccatccttgggttaggtatgtgttctccttgcatctcagctcctcagggagctccccgggtggcccacttgcttccttggctgtctctgccctgccttgagggagcatgcgtgatgatgcaaccagaaacacgtttttgagagctcttcccccctccatatgtcgtatataatagggagcttggagtcatgcccttcaggtctctaacatctttgaacactaccttctcacagtcagtggttcctgggtctgactgcattagtataatctgagataatctgagatccttgttaaaaatatagacatctggggtgtgcttccagagggactgaatcagggactgggcactgggaattcatgttgttttacaagtgctccaggtaattatgaagagcagccggcacatgaactaccacttggaaactgtgggtcttgaccgtatgtctgatcatgtctaatcttcacctcatgggtcatcacaaacttgaaaatctcatagccttcctctctgaaggttctagttacttctactccaccagccagttctttcagaattcagtttcctctcactgtatctctcctttctgaactatttatggggagttaatagtcaatgttcaatgaatgaactgaatctcaaacaatttctaggacatatgtttataagcaaattgaattggaaatatattggatatttggcctttagctaaatggaacttcataagatgtctcagtcacagcagccttccattactgttgtgacttgccagtttgaaatctgttttgttttttatattactttcttcaggatctaatcaggtgatccacagttgattcctttagtgacattgcttcaatttctcttttcttttattctcactttcacagcacattccactgtgtttctctcaggtttgcagattaagagaggccattatatgcctctttaccaaataagtgctatcttcttcctcatttaatcaacttgtttctttgggacctttccatggccagggtccaagcatggagctggctgcactgaggctctacctcgtgcagactatgatcctaagttcccaaaggagctttgttggcatgtagtcctctggcccatttcttgttgtcagctcccccaagggtgtgtgtgtatcttcatgcttgccttaacatgatgttttttaagaagccatgatcacaatatagggattttttcttcttttgctccacatttaaactataatttcccttctgtaccatagccgctctcaggcaagatccatatcatttatgcagttggtcaggccctcacagagatctgcccttttctggtctgagtaagggttccaattagcagaagcacctctctcctcaccacaggaaagcaaatctgggggaaacagaggagcccagaccagactgagctcagtttcctctcttgcaggattgttattttacatatatatgtatgtatgtatgataaaacactaggcagcttttattagaatgccaattttcatatccaaagagcttacagagtaattcacggctgttaattcattgagtctctgagcactaggccagacagcaaaggccgctttgcaagacagcttcacttcctgttagagtcagtttcagtcagccccagatttgcacttgactctgtccctgtcttactgtgtggccttgggaaagtttcttccttccttggaactctggtcccctttctcggactagctaaataatctttgaggggtgttcaagtcaccatatgtgaaaaatggctcttgcaaaacagggagttgttctgtatccaaggatttcctaactgaggctgacagttaagtcggtatctctctctttctctcaccttccaataggacagccctttcttggcggagcacaaatatcccactttacctgggaagctttcaggagccacgcccaatggagaggctgccaaatctcctcccaccatctgccagcctgacgccacggggagcagcctgctgaggctgagtgagtgtccagccctggtgctggtggcctctgagcagtgtccttggcactttcaatgattgtataagatccctgcacctaccaccacaatccacaattggagaatggtggggtgggtggctggaacaagttgtaccttggggtggtcccacctctagaggctccccctgggcgagctgttttctaaggtcagcactctacagtctcagcaaaccagggtgtgtgtatcccctacttcttttcggctgcagcttttcacccttatttcctctcttcttctcttcctcctctcgaactctttcctgtccttcctagcattgttttccctcctctcagacacccccttctacccttcctgcccctggtgcttccttcctctgtcattctgatcttctctctcctgtctccaccttcttctctgcagcttccctattccccgtaggagggtatcatgcactccaagtgggagcatttccttaggcaaatgaagtcagtggccaatgggcaagggtgtcggtctgcaggtatcctttcggtgcgtaagacctgaaaccacagaggcttttgctgcttttcattcaaaataagccatctttccccaccagcagcaaaagattcaatggccccggaagggaacattctggtcctggcagggttcttcctgaggctcctcagcctcagctcttccctgagctggcccatgcattggcctagtgaaggccagctctgccgttggctgcaggaacttcagataaacccttgaatgagtgtgttctagtgacactcaaactggactcactatggcttcagattgttctagtctgagctgagtgagcccaggcacctgcacaagagctgcctgtggcctggagtattcagcccctgctgctgtcccttcctttccctgggtgtggacacctcagcctgtcacaaaggggccccaggaacacttggtcccctcacatgaaacctcttctcagtgtcagtcaccactcaccccctccttctccatgggattatttttctttctgtttgagtttttctctcttgctcgatgacactcttttgtttatttctttgcttccccgtaactctgttgggctggactttggcctctcttgtttcttcatgtggcttctctgcttcttggttcactggagatcgtggccggagtgtcagtgcccccgtattaggtactgtacccattccaggtgaggtggagagtgagaatgcctttgtttccctaccctaaccctccccttcaccagcactcagccagggacccactactgcctgcgttcctgcatctccctctgaggaaaaagaagctgcttgttggaataatccacaagtactttggaccccaaatccttaaaattaaagacattagctcacctagatttgaaatattgagcacactaatttctcagcaaggaagcctggagtccccactagtctctgggatcttggtatggagttctgccctgaaggcagaactgggcagattctctggactcccactgaaggggagggcccaggcttggggaagaagggttccaggggtcacatccttacattcacattcattgccttcttccaatctcaggagacacagaaagtggctgggacgacactgctgtggtcaatgacctctcatccacatcatcgggcactgaatcaggtcctcagtctcctctgacaccagatggtaaacggaatcccaaaggcattaagaagttctggggaaagtaagttggtgccgttgatcctaattatattgcttagaatttttctttttgattgggcaaagagtctatgtaagcccctggtccaatagacactgaaacagcagtcaaaacagagtgttcatgttcaaagagaagaatctgagatattttccagggccaagagaaggagaagtatgaaagacacccattgaatatatccagttgcctttcatgtcatgcatcctaagcacccacccattccacacaccctgaacataatctctgcagcttatattacattggatctggcacagacacagatgagactgtattctcccttcttaggagtcagtctgttttaagaaatctttgaaaaacctttgaaagccaagtacttgctggcccaactgatccactttgtgacatgaggcagaaactggggcctcctacaaggcatcaaactttgctttgacttctatggcaagtgaccaaatcccagaggcaggatccgaattgaggcttgagtctggccaaggagctgcgacaggttgtgatccttgatctctgggaaggtacggagaagcagtgctgccgagagtccctgtgctggcctgcatggccttgcaaaagaggaagcacagtgactgtaggctttctgactattccatgaccgtctccatggattcttctccatgcagaatccgaagaactcagtcaggaaatttctacactgacacgctggggatggcagagtttcgacgaggtgggctccgggcaaccgcagggccaagactctctaggaccagggactccaagggacagaaaaggtaaggcttgacccactttcctttgatctccctgctctgaaaaagaagtatctcccttcaaacctgcacgggtgaatctttactcctgtgttttgcggaaacccctttccatattctcttccccagtcaagcagtccctacagtacgtcatttccagcacaatatctcctaagttctgagttactcagccaagatcagtactcctggaggtcttccacaggattggaatatgacattttatatctaaccaaaaggcaaaaagtaagctgtaactctcttcagtttagtcacctcaagattgccatataccaatgcagagtacaggtaattactggttatgatatgtatcattcagatgtccgttctcagaaataatatagtctaggttccaattaaggaagaaaagcatttccctaaatgcatcatattgtttgcagacctgcatcccctgtggaagggagtcttagcttattttgcacatggatatgatactgcacttccctggcttgccaaacaggtttctagtcttaccaggtcctcctcgtgcatgagacctgggacctttccagatccatttattcttcgatgagtatccccagactccaggaagcttgaaaagaagcatgagaatgtgtagaccattagcttttagaggctagagaatctaaggacatagtctaagtaagtcagagaccaattcagagcccttagaaagtgagccagggaaagctttacctgtatattcaataattagatattctaatttacttggcaattttctcaatgtagacattactgttgtttctgatttatctgagctgaaaaaaaatcaagctatagtaagcttgaatgattgatctttgttttaattctggctagttcttgaaggattgactctagaaggggaatcattgggtcagggtataaaaactttcctaagacccctcagcattgtccctagagtaggagagcatggttagggagctatctgtattctgacagtcactttagggtatggggtgaccagggtcagtagctttctttgccaaaggaaaaaactgcagttccagccacaggctgctttgttcaaatgtctttgtgctttatgaaccgtaacagtggatgagaaagggaagacgtatgaagaagtcctgatgagattgttatgtttatcgtaatggtgcaaaatgaatttgctcgtggaaaagaaaggccttgtgactcttaactagaaattgatatatgttaatgtcctctggtgatatttataatttctagatattaatatttaggtgtagctttaaaactgttgttgctagtattctttaggaaaagtactttgatactgaaagcctccagccccaacctttttttgttcaataaaacaattgatttttttttaaatatgatatttgataacattgtgtaggcactctctctcagattatggatgaacacattttattttctttcttctcccaggtaaagttttacagagttacattccagtcagcactgctggacagagtgcgcctattacacccacatccttgtcagcattgagtagttaaatttttctttttcaaagttttctacttttatgaacctccaaatttcctttttattggtaatttagttttcatgtttgtccttttaattcttttgtgaattatctgcatttttgttcattattattattgtatttcttatagatttctaactgttctctattaagatattaagtcatgtctagtaattgtgacaaagtatttttaggtttgtagcagaattttacttttgcttctgatactttgatacatggaatttttatgtttatatagaattaggttcatccactttgtgaattctttcatcattttgttttaaatttttttctgtgatttttaaaaactttgaataatccatttaggaattattatagtttgtgagtttattatgagttactatttttgagaaaaaggcagtaaagtataatgtttaaggcaaacaggctctagagccacatggctggatcccacctttgcggagtgtttttttcctgagttgatctactgactgtattgcccttcaggactccagctttaggagaggtccccaatcctactgctcccctaccctgggccccattttgtttccttttcctacacgcatggtgagtcagattcatcatgaatgtaaagatgcttaagcttcagggaccctcctttgtatggagcccttccagggtccagagaaagtctgatcatagtgttaacagggccaggtgttttgaaaattttgcctaaaaaaggtattttaggccgggcgcggtggctcacgcctgtaatcccagcactttgggaggccgaggcgggcggatcacgaggtcaggagatcgagaccatcccggctaaaacggtgaaaccccgtctctactaaaaatacaaaaaattagccgggcgtggtggcgggcgcctgtagtcccagctactcgggaggctgaggcaggagaatggcgtgaacccgggaggcggagcttgcagtgagccgagatcccgccactgcactccagcctgggcgacagagcaagactccgtctcaaacaaaaaaaaaaaaaaaaaaaaaaaaaggtattttaaacacaaccagttttaagactgctgactatttttactgcaactttcccttggtctatacttttccttgtaacagatggtgttagggcagctgtgggggttttggaggacttgctaaggggaagttgacctggggatccatgtagtttgggtttaggggggtatgtgtgtgcatgtggtttgcagtcactgcatgtttagttttgttaggtttaattcactagctttcctactgcacaaatggcttccaggatttcttctacttcccattgtgccgattcgctcagtgctctgtactcactaatgaactgtaaattataaatgtgccatgtgctctccccctactgtgagaagagcatatttgagaaatctcagctacatcatttgaactgcaatttgaaaggatgttttggaatgtgtcaacaaaacaaatggtttggctgtatatgaagggtatcttctctgtcatctccaaattatttcccagcgtgttcagtggtgccctggctgaggatatgggagatgctggcactgagaggagctgaggaggaggtgcagaagctgggtctgattctgtgtgaacacctcaaggcttaggaggcaggagaggattcgcaaaacaaaaaatgggaagactactggagatgatgcccagagctctaggtggttttgaaaaggtcgatagcacagaggttttccaattatgatctcaaaaacacttatttcccctttagagctgaaatgttaggttcacaaagactaggcaaaaaataaaagttaaaaaatttaaaaaagaactgaaatgtccctcagatatgtttgtttttcccacttccaagaaacaaggaaacaaatgaaataaaaaccaaatataatataaaacaaaagtgataaaatgagcattgaaatttgagagaaattattctttcttacattaaaaaacaaattataaacaaaaaatccagatcataccaaaagcagtaatttgctaagagcaagaggtaaggtttaaacaaaaggagtgagtagccctctagattgttgttcatataagatgaatgatatgaatccattgggaaaaggttgaaatttacttgctgagtttacatgatgtactgacagtgacaaagataacataaaactcatgtannnnnnnnnnnnnnnnnnnnnnnnnnnnnnnnnnnnnttagaaaacttgaatgcgttatagttttacaactcacatataaaagacatttgatagaggcctttctaaatttaaatgattctaaaaatgtacgtgacaataccagttataaattgtgaagataaaacttcttaactattgtcatagaagataaatattgatcagtcatgctagaagaaagactaaatcaaccgtctgttgtcatagaatatattataaagttgtggacatacaaagaagcagtcaaagagtatccacccaaaatacgagagtaaagaagtactatagctggatacagtagctcagacctgtagtcccagctacttgggaggctgaggcaggaggattgcttgagcccaggagctcaaggctgtaataagctgtaattacatcactacactccagcctgggcagcaaagccagaccccatctctaaaaataattaattactaacaccctgtctctaaaataaataccccatctctgaaataacaaataccctgtctcaaaaaagaatcaaactatagaggtacatcaagattttatataatgaaatatttctagattttgtgatttttttttcagttttgcaaaacttgcaattttttgtggcttgttttctaattctaaatattccctttgtttctaattgtatattcaaattttatactattttgaagagaaagtttgtaagttccaggcctcgtaaaatattttcaggacccatgaaagcccaggttccagattatgattgatcagtccctgccccagggtatacattatctctaacatttgatctaaaatggggcattcttatcatgcttatcctttgaggaattccctcactttaacaacagctcaaccaggcatttaaaaaaatatgttttaatctaatatgttaggggtactttgaaggaatctttctggtctttgaaggaatatctacgatattctataaatcctcatttatgaacataaagttgctctgtcgaatcccccctaaaaaaatgactctattgggatttttagtgtgctattcacactttaaatgaaaaatggatgtctttaagaattgatggctttataaaacccagtcatcctgtctaggaacataatctagcttttcatttattcatgtccttttttatctagctcagttgactgctgcagtcaatacctctccccacccccgcaatccccacacataatcacacaaggccaaacatctcttgttaaggcaattcctagacgttttataatgttggttgctatgagtgggatttttaaattgttttaacagtagcattagtatctgtgcattgatggtattagaaaattattgatctttgtatgtaacatacgttacatatgtttatatgtgtatttcgtaagtggccacctcactgagctttcttgggttttctaaatgggcagtcctgacatctgtaaagaatggctttatttctgcctaatagctatacttcttgttcttatttatctctaatactggctatgactctcagaccagtgttgttagtactgatgaaaaatatattgtccttttattgactttaatgtgaatgttcctcctgttttgttaataagtaatgtgctagctgttgttgattggcaagtttttgcttttagttttgggtgttttgttttttttctttttaatgttaagagaactgaccctcttaaatgctaagaaaagtagttttctaagcattttcctaaaaagatgattccgcctaatgaggccacagctctggacttgtggcatgtatatgtgtgtatgcggacctaggacatgtgaacatgatctcaggagggccatacaggctgccccattctctaagtagcctgagatttgaaattcagatcttgtgttattaagaaaactctagggtctacctcctatgagtgtgttgtagtggaattttgttcagcagaatcccatgatggaggttgtttgttaaaaaacaggttttttgttttgttttttcttttcttttcttttgtttgtgagacatgattagattcagaacctcaggctctcccactaacaggaatatgctgttttcctgcttcccagtgacgccaatgccccctttgcccagtggagcacagagcgtgtgtgtgcatggctggaggactttggcctggctcagtatgtgatctttgccaggcagtgggtatcttctggccacaccttattgacagccacccctcaggacatggaaaaggtaagggctcagcttggggagaggaggctcccatttctccccaaagcatggggaggccagggtccgccactcctgtcacacatacacacaggaggatggatggaggaggctgagagttcctctgtagctgcaggttggcatcccagggcacggtgtggagatacactgccatactcagagcatctccacccagacacagctttctctgagggccaaattgcctgccaaaatttcacatgtggtcttcatcttttaatttcaggagctaggaattaagcacccactccacaggaagaagcttgttttagcagtgaaagccatcaacaccaaacaggaggagaagtctgcactgctagaccacatttgggtgacaagtaaggataggcatatatgtattaagaatgtctctggcagcaactaagagtagaaagaattttcctgttaaatgggtacctcaaggacagctgtctccttgtaaaaagcagaggaattactaaacttttgggggaataaaacgaacctcaaaatataatttgctcccctttttttggtgtctacattctctcattctcatgaatcctgacacatctggggtttttgtatttgtagggtggcttgatgatattggcttaccccagtacaaagaccagtttcatgaatctagagttgacggacgaatgctgcaatacctaactgtggtgaggactttttctttaaatatttcagttgtccctgtgagcactcagctcacgtgtacccatggtggttattttaaacttgattccatatattcttaaggccttgaaatagtatcatttgtcacaaaagaggtcccaagtagcagagtacaaaccactgtgataagctattggtgtctccacgtgcaccttcctgagatgtggttgacttgtctatgcttggtctggtgagggacatcaggggtcttttgtcactttggaaactctggtttataaaccaaactttcctctttcagaacgatttactcttcttaaaagtcaccagccaactacatcatctcagcatcaaatgtgccattcacgtgctgcatgtcaacaagttcaacccccactgcctgcaccggcggccagctgatgaggtgagaccacaaatagtatctctccaggtagccctgagccaggacccctgaaacatcgagcatgagcaaacaagaatgacatcataaaagcactgttttttgcaccatggtgcctgggattcttttgtttgcttgtgcttcctgttgccccaaacatccgttacctgcactttgtgtctcacagtagccatagacctctaagctcccaccctccactggggagacacatgctataaagtcatcatagtgattaaaggagatgaggagatggtgcaaaggagagggggagggaaagacaaaatggaaagatgggtgtcacagtagaagagaagagaagagacagaggagggggaagaggagcccgtagaagctagacatttcagaataggtatccctacttgtagatccaaaattaactgacttccaggcccaggtacaggggatccatgagtagtcttgctagagaagaaatagtatacgtaaataacagcaccccaagtcttgaagaaataactgattatgttccatgaacttcggagttcttggtggacccccaaactgaagattgtcagtcacatcctatctcctctgttcctgggaactaggtctaaccttgctgtaaaattaactcagcttcctgggctgctacctttgctgtctatctcctattttctccttattcaaccaacatgttttgaatgtcttgtatatgtcaggcacagcgctgtgcatttttaagaccacagtgctacgtgagagcacttaggaataagtaccttaaggtgtgctcccctaaaatcattggccacaccagggagatctttcatctataaaccacttggattgtaaaattgacagtcatctttaaagttctgttgaatcactgaaagaataactataatgtcctcatttatttgtctcaaagttagctggaaaatgatggagtaacagaattctggattcagatatctcagtgtggaagatcttcaaagattcagtgggagctctatttcctagaaactggggaggctggtgctctggcagatggggtgggtcactaagcttgagggccttctattgttgtgatgcgtctggggcagggttacttaccggggctgactccacagaggaccatggtgggacctattaagcctaacttcctcactctccttctccctctgacagagtaacctttctccttcagaagttgtacagtggtccaaccacagggtgatggagtggttacgatctgtggacctggcagagtatgcacccaatcttcgagggagtggagtccatggaggcctcattgtgagtggctctctggcctagcccacctgccttggtgcaaatgggatattcagaaacttatttattaaggacaagacacaaaagctaacgaaaaaaaataggtacttcatctggaggtcttgcataatttgatgtctcaaagtattttgataacttgtccttgagaattaatatacctcatggaagcaagatgccttctggcagcacctccttggcatgagacttgaggattctaggtcgatgggttgcatggagaccaacgcttacaaggcgagggaacagcagggctgaggaagggacggggaagccgtaaaaatgcagcttcccacttgctgcaataggatccctatcactactcagatctgtcagtggcaaagccagaggggaaatgaggaagtgtggtggcttggatgtcatccagagaagatcctgagagacagcctcaccaaagaggtcccagttctctgctggtctgtgaaaacaaggtggtcagtcagcacatgtgctagtatgtgctcagagccaggccctgtgccagccagtgagtggagtgggactcagaacaagtgactgagctcctgtccctcctctggaggcacccccagccccaacaggccagtctctcagcatcctccccctcgagccatttgtatttgctcctggccaggcttgtctctggttccttcttagatcctggagccacgcttcactggggacaccctggctatgcttctcaacatccccccacaaaagacgctcctcaggcgccacctgaccaccaagttcaatgccttgattggtccggaggctgaacaggagaagcgagagaaaatggcctcaccagcttacacaccactgaccaccacagccaaagtccgggtgagttgcagagcctttctgggtgggccctgggctgcctcctggccctcacgcagcacagcacctggcgcgatgcccacagccagagcagcatgcgcagcctggacaaagaggatctttcagcttctgctgtgggcttgtggtctgtgaggccagtctttgttaagccagttctccaccagtttggagtccaaggaagacagtgcaggtttctttacctagaaaatatgtgcaggaagcacctatcctcaggtggcttagagctcgtcctctaccccactgctgctgtgactcaccttgcagagcggaagcgctccgagtctggctttccttcggtcaggcctgcctgcgtgccgcaatgccgtgggatcttggtcaaagctgtcctgctgatataggaagtgcttccaatggaagctggttccatttgtcttgtttcgtgaagtggccagcacacagatacccagaggtccccaggtctttcaagcaccaacactactcactggggctcccagaatcccacaaagccctttagacctgcctgagccacagcatcctcagaccacattcttcccagactacagaccaacaggcaacctctggaggccaggctggtcctatccctggtagtgttgatgcttcatgcccagctacaactcaggcacagacctccttccccaggggagcaagacaggaagtatgtctgggggagtcaggcagaaacagtgctggatgacgctagggcagggagcaacctggggctatcctacgcgcctttagatggtgccaggtgctgagatgggaaagggttggggtgccagcagctgtgctgaggcaagttctctgtgcttcgcctcaaatgcagacctcaagtacattctaaaggaactcccagttcatctatggaaataagaaagtcactttggtggggcagccaggcatgagtttcaggcatagtattggaggggcagctcttattgttcaagattatttacctattggcctttctgcagcatagaaattgcttccaagagctctgttttgttcagagtctttctaggagcagtttacattattcctctccttgagtgcctgctcttaaattttaagtatattgtcagtcatacctgcacactgccttgattgccttctcataatcttgcattttctgtgttttagccaaggaaactaggattttcacacttcggaaacataagaaaaaagaagttcgatgaatcgacggactacatttgcccaatggagcccagtgacggtgtcagtgatagtcacagggtctacagtggctaccggggcctcagcccccttgatgcccctgaactggatgggctggaccaggtgggacagattagctgatgcccttgtcacctgccctctgtgcaccctgagagctcacagtaacactgtgtgtgtcaccatataactgcacctcacccccgcacgtgtgcatgactcgcagagaatattccagcaattgtgtacccctgggccagtctctttgaaccctgagggtggccaggatctggagctgcatctctaaggggccaggctttggggaccattgccaaaggtggactcaggaggaaagacacttaaagacacttttacatgtctagtaattcttgatgttcatcttcagcaccagtggaaacacatgaacttcgatgcaggtccagagaccatggacactcccacgaggctcagctctcaggcaccccctacacttcagttgagggaaaagctcaagtgccttaggcccgtggaccacagtcttggctgagatcaaagggatgagcaacagggacttctgccacagtgacaatggaattgtgttgtgccttacttcagaggtggtctcttctttcttgtaataaaagcaatatttatgcggaaagcaagcagctcaccatatctttaactttgttggggaaaaagagctgagggtagctggaaatggagtcctacggattgcagagctgaagagccggtggcactgagcctagtcctcagccaggtgcatgctcaggattcaccaggggggtagagcaaggcgggaccccctcccatagccttcagaggaggtccgtggccgcactgcttcagaatttgcttccctctgtgaagccgagggggcttcaagtctcatgcacatcctgaccatagggtccatctgtcatgcagacctcaaagctgagtgctttcagtggcatgagcccccccagtgaaggggatggtggggagacaagaaggcaccttgctggaaagactctctttcatgtgttttgctggcttctctattactgacttagctaggctcataaccatggtgggggctggtctgtctgctggcagaactgaaagagatctgtccccttgatttagaggctgactgactgataatgactgataatggctcctccagatgggccttgtctggctgggactgaggtagagatgtgccttgccagtctggactcctggtcagcagactctagtttgcccccaggcagtgcttggctcccctcaatcccctgggcctcatcgcagaagagtaacaccacgtcaccgctgtctgatggcctgggcacggcctgatgactccattccattgtagcactctgattctgtaccagatggaggctatgctaagatttgcttcttaaactaccagcagcctcaggcatggtctgttgccacaggccactgcctcctgggaggtgagagatgtggggacaagcttgccagctggcaatgctgctgatagatcctggtacccaggtccactggatgacaagtgctcattcaggctgatgcctggccactggagttgtagagccagtcagggcaggctttgtcccttgtttcttatgttgcggtacagggatctctgcatgtgcctgttttcaaaacctgcatggaactgttgtgccactgattctctgcaccctcaagtaagtcctgttccctttgtgggcttgttttcctacctataaaacaagggaggggttacacttggtgccctccaaatttacagaggatgtttccaaatctacagtgtctaagtaggtttagggaaggaggaagagaccagcattacctgagaaggaggggcaggagggaggctcttgagtagtgaggaaggatgcccacctatgtcagggcattggtgtctgagctcctgttgcctggtagcaggagtctagcatcctgaaggccttcattcctactgctctctgctcctggaaatagctggaacattgaacacgtgcagaagggctgcttctgacaagcttgtgtcttgcctctgtgtaccctgaatgccagttcccagtggggccccaggagaggtatgcatgcagtgtgggacattgatgcctttccccaggaaacaggagcagcatgtgctccacccacctgtcactcctcagggcctggcccactccttgcctgtccctccagagaagcatgccctggagaagccaggcttgagcacgacaggacttgcatgccatctctctgaatcacaagctgcatccatgtgtgctgaccaggctgctgcccattttacagatggcaccttcggaaggtaccgtgacgcagatagggctcctctcccaagacattcaccgccttacggtaggactctgaccctctccccacagtcagactggtgccagggaggcccagtgagtttggtgtggtgtggtgtggtatgcacaaggcctgggggacggcgaagaatggtgcttagtgctggggtcacagcctgagcctgagccagccacgaggcagaaagcagcccaggggccttctctgttggcctgttactggaccttgagcccctaagggcagtggggaggctcatcggctgttagccaaagccagctaaagcacactagatctcaggtcctcttcccaggcttagagatgaggaaaccaagatgctcagcaactctagatcacctgtctcatcagcctagagcccaggctgcatcctgtcctagtggacacttccaccctctgcccagagacacatgcatttcctatcgtgcctctgactttgtgggtatcacagagtgttgacaggcttgtgagcacatcctggcacgcccgaaaggacaaaccatatcatggggaagcagtttggcctcgaaaagcagctttggagtgaggctgaagtccctgctctgacttcactagctctgtgaccttggatgtcattctctcctgagctttggcttagttatctgtaaagcagggctaatgacatcctccttgccaggcttataggcagactagagctggcaggaaaaggccagccacagagcacaggatttgtttttgaggatccatcactcccaaggccttttagttcttggacattccatcactgagcctattggctatagtgtctgtccccatcgaggcccctgtccctgtactttgcttgcttgtctagcaaggcccattgggatgacaggacaaggacagggacacacgactctccttgttttcaaggacaaaacaggaaagtctccctgactccaaacaggatcacttttactcaacgtttttatttattggcccacccatgaaaggaatctgcccacacttgcccttatgatctaggcctttggtggcctgaaaatagaaaatttatttctaagatgaacaatttatttttatcttaatagtgttgtttattctgacccaatactcagggtttcttgggacactataaacttatagtgcacctgtgtcagatgcagccctcacccagtgccctctagttccggtgcagctgccgcagggcagcctggaccaaaactctattaaactgacccttcggctgtgtccttttcagacaatgctgagccaggaccagctgctgaatgactctcgcctgcctgcccccaactctgatgactggagatgactttcttcgtggctgagagcgtagggaggcatgtgtgggggccccggagcctttgcttctgtggggagcgggcacacagccccctctgcaagcccagtccgggctggcagggtgtctcagacaggctgctgacaggcatgaagcagagctgtgggacaggtgtccaggggtggccccagggtccatgtgtgtcttcaaccatgctgcgctcttcaccgcaggcttcataccttttgtacttttatacgtggactgcagaccactttgtgggagggcagtgacatatcagcacacagactcgatggctcgtgatattcctggtgacagcctggaggctctcacactcgaggggaagagctgttagttcataaaacctgctggaaaaaaagttccgaaaaactgttttgaatgttctgtagagactgtgttttgtgaaatggtcaccaggaggtccctccggggctgcttcacagaacgtgctttttccattcttgggactgtggctgggcaaggcaggtgtttagggtatgagcgggtaaagcaacgaggctccttacccacagcactgcctgactctatctcccgtcatctgcaaggggtatctgtgcgactcccagcttggagcagaggcgtccccaacacgtgcacaccctgccttctgcctccacccaagctgacacacagcctcctcccaggccttgcccttggagcagctcaggcgtaatgtctgattaaatagctcccccaagtggaaggcccttgagcacctcaagctccgtgtttccaccccaactcaccaacttcccaaacatgtctgtttcctctccactctttagtctttcctccctccaggcgtctgctcaggcccttccctcactagggaatgcatttttctcctagtccccttcatgagggaaaatcctgtctctcaaggcacggcaaagagaccatctctcaggaagccttcccgcatgatccagttacaggtagctctcccacagtgccgtgtctgcccttgagccagagcacagctcaccttgaagtttcttgtcgtcttaccatacccgtcctcaccacaaacttggagcacctgctctgcactggctcctgtagacagtcctccagttgccaaggagatccgtgctcctaagttcctcatccacccactccttcgcatgtgtgtgttaagaaccttccatgccagggctagagatacaggcatgaatgccaaggtccctgcctaaaggtgcttacagtgtagtggagtacagaccagtttcaaacaagactctgccaaaggttacagatgctccaatattagtttctgcagcctaaaagagcatgttgtcattttttttttattatactttaagttttagggtacatgtgcacattgtgcaggttagttacatatgtatacatgtgccatgctggtgcactgcacccactaactcgtcatctagcattaggtatatctccagggtgctatccctcccccctccccccaccccacaacagtccccagagtgtgatattccccttcctgtgtccatgtgatctcattgttcaattcccacctatgagtgagaatatgcggtgtttggttttttgttcttgcgatagtttactgagaatgatgatttccaatttcatccatgtccctacaaaggacatgaactcatcattttttatggctgcatagtattccatggtgtatatgtgccacattttcttaatccagtctatcattgatggacatttgggttggttccaagtctttgctattgtgaataatgctgcaataaacatacgtgtgcatgtgtctttatagcagcatgatttatagtcctttgggtatatacccagtaatgggatggctgggtcaaatggtatttcccagttnnnnnnnnnnnnnnnnnnnnnnnnnnnnnnnnnnnnnnnnnnnnnnnnnnnnnnnnnnnnnnnnnnnnnnnnnnnnnnnnnnnnnnnnnnnnnnnnnnnnnnnnnnnnnnnnnnnnnnnnnnnnnnnnnnnnnnnnnnnnnnnnnnnnnnnnnnnnnnnnnnnnnnnnnnnnnnnnnnnnnnnnnnnnnnnnnnnnnnnnnnnnnnnnnnnnnnnnnnnnnnnnnnnnnnnnnnnnnnnnnnnnnnnnnnnnnnnnnnnnnnnnnnnnnnnnnnnnnnnnnnnnnaggtccttcacatcccttgtaagttggattcctaggtattttattctctttgaagcaattgtgaatgggaattcactcatgatttggctctctgtttgtctgttgttggtatataagaatgcttgtgatttttgtacattgattttgtatcctgagactttgctgaagctgcttatcagctgaaggagattttgggctgagacaatggggttttctagatatacaatcatgtcatctgcaaacagggacaatttgacttcctcttttcctaattgaataccttttatttccttctcctgcctaattgccctggccagaacttccaacactgtgttgaataggagtggtgagagagggcatccctgtcttgtgcccgttttcaaagggaatgcttccagtttttgcccattcagtatgatattggctgtgggtttgtcatagatagctcttattattttgaaatacttcccatcaatacctaatttattgagagtttttagcatgaagggttgttgaattttgtcaaaggctttttctgcatctattgagataatcgtggtttttgtccttggctctgtttatatgctggattacatttattgatttgcgtctattaaaccagccttgcatcccagggatgaagcccacttgatcatggtgaataagctttttgatgtgctgctggattcgttttgccagtattttattgaggatttttgcatcaatgttcatcaaggatattggtctaaaattctctttttttgttgtgtctctgccaggttttggtatcagaatgatgctggcctcataaaatgagttagggaggattccctctttttctattgattggaatagtttcagaaggaatggtaccagttcctccttgtacctctggtagaattcggctgtgaatccatctggtcctggactctttttggttggtaagctattgattattgccacaatttcagatcctgttattggtgtattcagagattcaacttcttcctggtttagtgttgggagagtgtatgtgtcgaggaatttatccatttcttctagattttctagtttatttgcgtagaggtgtttgtagtatgctctgatggtagtttgtatttctgtgggatcggtggtgatatcccctgtatcattttttattgcgtgtatttgattcttctctctttttttctttattagttttgctagcggtctatcaattttgttaatcctttcaaaaaaccagctcctggattcattaattttttgaagggttttnnnnnnnnnnnnnnnnnnnnnnnnnnnnnnnnnnnnnnnnnnnnnnnnnnnnnnnnnnnnnnnnnnnnnnnnnnnnnnnnnnnnnnnnnnnnnnnnnnnnnnnnnnnnnnnnnnnnnnnnnnnnnnnnnnnnnnnnnnnnnnnnnnnnnnnnnnnnnnnnnnnnnnnnnnnnnnnnnnnnnnnnnnnnnnnnnnnnnnnnnnnnnnnnnnnnnnnnnnnnnnnnnnnnnnnnnnnnnnnnnnnnnnnnnnnnnnnnnnnnnnnnnnnnnnnnnnnnnnnnnnnnnnnnnnnnnnnnnnnnnnnnnnnnnnnnnnnnnnnnnnnnnnnnnnnnnnnnnnnnnnnnnnnnnnnnnnnnnnnnnnnnnnnnnnnnnnnnnnnnnnnnnnnnnnnnnnnnnnnnnnnnnnnnnnnnnnnnnnnnnnnnnnnnnnnnnnnnnnnnnnnnnnnnnnnnnnnnnnnnnnnnnnnnnnnnnnnnnnnnnnnnnnnnnnnnnnnnnnnnnnnnnnnnnnnnnnnnnnnnnnnnnnnnnnnnnnnnnnnnnnnnnnnnnnnnnnnnnnnnnnnnnnnnnnnnnnnnnnnnnnnnnnnnnnnnnnnnnnnnnnnnnnnnnnnnnnnnnnnnnnnnnnnnnnnnnnnnnnnnnnnnnnnnnnnnnnnnnnnnnnnnnnnnnnnnnnnnnnnnnnnnnnnnnnnnnnnnnnnnnnnnnnnnnnnnnnnnnnnnnnnnnnnnnnnnnnnnnnnnnnnnnnnnnnnnnnnnnnnnnnnnnnnnnnnnnnnnnnnnnnnnnnnnnnnnnnnnnnnnnnnnnnnnnnnnnnnnnnnnnnnnnnnnnnnnnnnnnnnnnnnnnnnnnnnnnnnnnnnnnnnnnnnnnnnnnnnnnnnnnnnnnnnnnnnnnnnnnnnnnnnnnnnnnnnnnnnnnnnnnnnnnnnnnnnnnnnnnnnnnnnnnnnnnnnnnnnnnnnnnnnnnnnnnnnnnnnnnnnnnnnnnnnnnnnnnnnnnnnnnnnnnnnnnnnnnnnnnnnnnnnnnnnnnnnnnnnnnnnnnnnnnnnnnnnnnnnnnnnnnnnnnnnnnnnnnnnnnnnnnnnnnnnnnnnnnnnnnnnnnnnnnnnnnnnnnnnnnnnnnnnnnnnnnnnnnnnnnnnnnnnnnnnnnnnnnnnnnnnnnnnnnnnnnnnnnnnnnnnnnnnnnnnnnnnnnnnnnnnnnnnnnnnnnnnnnnnnnnnnnnnnnnnnnnnnnnnnnnnnnnnnnnnnnnnnnnnntccatccttttattttgagcctatgtgtgtctctgcacgtgagtatgggtttcctgaatacagcacactgatgggtcttgactctttatccagtttgccagtctgtgtcttttaattggagcatttagtccatttacatttaaagttaatattgttatgtgtgaatttgatcctgtcattatgatgttagctggttattttgctcgttagttgatgcagtttcttcctagtcttgatggtctttacattgtggcatgattttgcagcgactggtaccggttgttcctttccatgtttagcacttccttcaggagctcttttagggcaggcctagtggtgacaaaatctctcagcatttgcttgtctgtaaagtgttttatttctccttcacttatgaagcttagtttggctggatgtgaaattctgggttgaaaattcttttctttaagaatgttgaatattggcccccactctcttctggcttgtagggtttctgctgagagatccgctgttagtctgatgggcttccctttgagggtaacccgacctttctctctggctgcccttaacattttttccttcgtttcaactttggtgaatctgacaattatgtgtcttggagttgctcttctcgaggagtatctttctggcgttctctgtatttcctgaatctgaacgttggcctgccttgctagattggggaagttctcctggataatatcctgcagagtgttctccaacttggttccattctccccatcacattcaggtccaccaatcagacatagatttggtcttttcacatagtcccatatttcttggaggctttgttcatttctttttattcttttttctctaaacttcccttctcgcttcatttcttttatttcatcttccatcactgataccctttcttccagttgatcgcatcggctcctgaggcttctgcattcttcacgtagttctcaagccttggttttcagctccatcagctcctttaagcacttctctgtattggttattctagttatacattcttctaaatttttttcaaagttttcaacttctttgcctttggtttgaatgtcctcccgtagctcagagtaatttgatcgtctgaagccttcttctctcagctcgtcaaagtcattctccatccagctttgttctgttgttggtgaggagctgcattcctttggaggaggagaggcgctctgctttttagagtttccagtttttctgttctgttttttccccatctttgtggttttatctacttttggtctttgatgatggtgatgtacagatgggtttttggtgtggatgtcctttctgtttgttagttttccttctaacagacaggaccctcagctgcaggtctgttggaataccctgctgtgtgaggtgtcggtgtgcccctgctggggggtgcctcccagttaggctgctcaggggtcagtggtcagggacccacttgaggaggcagtctgcccgttctcagatctgcagctgcgagctgggagaaccactgctctcttcaaagctgtcagacagggacatttaagtctgtagaagttacttctgtctttttgtttgtctgttccctgcccccagaggtggagcctacagaggcaggcaggcctccttgagctgtggtgggctccacccagttcgagcttcccggctgctttgtttacctaagcaagcctgggtaatggcgggcgcccctcccccagcctcgctgctgccttgcagtttgatctcagactgctgtgctagcaatcagcgagactccctgggcgtatgaccctcccagccaggtgcgggatataatctcatggtgcgccgttttttaagcccattggaaaagcgcagtattcgggtgggagtgacccgattttccaggtgcgtccgtcacccctttctttgactcggaaagggaactccatgaccccttgtgcttcccaagtgaggcaatgcctcgccctgcttcggctcgcacacggtgcgcgcacccactgacctacacccactgtctggcactccctagtgagatgaacccggtacctcagatggaaatgcagaaatcactgtcttctgcgtcgctcacgctgggagctgtagacgggagctgttcctattcggccgtcttggctcctccctcgcatgttgtcatttttaatgggggtttggggaaggagtctgaataggttccatggaagagatgacacttg

SEQ ID NO: 178 - DNA, 3565 bp, Homo sapiens
gggcggggctgaccaggccggtcccccgggaacaggaaccctggtggacgggtcccagcaggcttcttcggtgcccgagagggagcgggtgcccaagggggtggtccctgtggcaggtcccggggtgggggcgcggcgctcccgggaagagccttccgcaggtgccccgccccgtcacgtgggcgccggccccggccgctgcggcaggaaaaactggcggagagcctcagaaccacctgtttcctctgctgcaccatgcttgagtgtggaagccgtgcccctgttctccacagcgtgtatggccattcggcacatgtgtagatttgctgaatgagcaaacagcaactcctccagtttacagactaagaagaggaggaggccaggcaggcaaaaggagtcatggcttctgatgctagtcatgcgctggaagctgccctggagcaaatggacgggatcattgcaggcactaaaacaggtgcagatcttagtgatggtacttgtgagcctggactggcttccccggcctcctacatgaaccccttcccggtgctccatctcatcgaggacttgaggctggccttggagatgctggagcttcctcaggagagagcagccctcctgagccagatccctggcccaacagctgcctacataaaggaatggtttgaagagagcttgtcccaggtaaaccaccacagtgctgctagtaatgaaacctaccaggaacgcttggcacgtctagaaggggataaggagtccctcatattgcaggtgagtgtcctcacagaccaagtagaagcccagggagaaaagattcgagacctggaagtgtgtctggaaggacaccaggtgaaactcaatgctgctgaagagatgcttcaacaggagctgctaagccgcacatctcttgagacccagaagctcgatctgatgactgaagtgtctgagctgaagctcaagctggttggcatggagaaggagcagagagagcaggaggagaagcagagaaaagcagaggagttactgcaagagctcaggcacctcaaaatcaaagtggaagagttggaaaatgaaaggaatcagtatgaatggaagctaaaggccactaaggctgaagtcgcccagctgcaagaacaggtggccctgaaagatgcagaaattgagcgtctgcacagccagctctcccggacagcagctctccacagtgagagtcacacagagagagaccaagaaattcaacgtctgaaaatggggatggaaactttgctgcttgccaatgaagataaggaccgtcggatagaggagcttacggggctgttaaaccagtaccggaaggtaaaggagattgtgatggtcactcaagggccttcggagagaactctctcaatcaatgaagaagaaccggagggaggtttcagcaagtggaacgctacaaataaggaccctgaagaattatttaaacaagagatgcctccaagatgtagctctcctacagtggggccacctccattgccacagaaatcactggaaaccagggctcagaaaaagctctcttgtagtctagaagacttgagaagtgaatctgtggataagtgtatggatgggaaccagcccttcccggtgttagaacccaaggacagccctttcttggcggagcacaaatatcccactttacctgggaagctttcaggagccacgcccaatggagaggctgccaaatctcctcccaccatctgccagcctgacgccacggggagcagcctgctgaggctgagagacacagaaagtggctgggacgacactgctgtggtcaatgacctctcatccacatcatcgggcactgaatcaggtcctcagtctcctctgacaccagatggtaaacggaatcccaaaggcattaagaagttctggggaaaaatccgaagaactcagtcaggaaatttctacactgacacgctggggatggcagagtttcgacgaggtgggctccgggcaaccgcagggccaagactctctaggaccagggactccaagggacagaaaagtgacgccaatgccccctttgcccagtggagcacagagcgtgtgtgtgcatggctggaggactttggcctggctcagtatgtgatctttgccaggcagtgggtatcttctggccacaccttattgacagccacccctcaggacatggaaaaggagctaggaattaagcacccactccacaggaagaagcttgttttagcagtgaaagccatcaacaccaaacaggaggagaagtctgcactgctagaccacatttgggtgacaaggtggcttgatgatattggcttaccccagtacaaagaccagtttcatgaatctagagttgacggacgaatgctgcaatacctaactgtgaacgatttactcttcttaaaagtcaccagccaactacatcatctcagcatcaaatgtgccattcacgtgctgcatgtcaacaagttcaacccccactgcctgcaccggcggccagctgatgagagtaacctttctccttcagaagttgtacagtggtccaaccacagggtgatggagtggttacgatctgtggacctggcagagtatgcacccaatcttcgagggagtggagtccatggaggcctcattatcctggagccacgcttcactggggacaccctggctatgcttctcaacatccccccacaaaagacgctcctcaggcgccacctgaccaccaagttcaatgccttgattggtccggaggctgaacaggagaagcgagagaaaatggcctcaccagcttacacaccactgaccaccacagccaaagtccggccaaggaaactaggattttcacacttcggaaacataagaaaaaagaagttcgatgaatcgacggactacatttgcccaatggagcccagtgacggtgtcagtgatagtcacagggtctacagtggctaccggggcctcagcccccttgatgcccctgaactggatgggctggaccaggtgggacagattagctgatgcccttgtcacctgccctctgtgcaccctgagagctcacagtaacactgtgtgtgtcaccatataactgcacctcacccccgcacgtgtgcatgactcgcagagaatattccagcaattgtgtacccctgggccagtctctttgaaccctgagggtggccaggatctggagctgcatctctaaggggccaggctttggggaccattgccaaaggtggactcaggaggaaagacacttaaagacacttttacatgtctagtaattcttgatgttcatcttcagcaccagtggaaacacatgaacttcgatgcaggtccagagaccatggacactcccacgaggctcagctctcaggcaccccctacacttcagttgagggaaaagctcaagtgccttaggcccgtggaccacagtcttggctgagatcaaagggatgagcaacagggacttctgccacagtgacaatggaattgtgttgtgccttacttcagaggtggtctcttctttcttgtaataaaagcaatatttatgcgg

SEQ ID NO: 179 - protein, 862 aa, Homo sapiens
MASDASHALEAALEQMDGIIAGTKTGADLSDGTCEPGLDASYMNPFPVLHLIEDLRLALEMLELPQERAALLSQIPGPTAAYIKEWFEESLSQVNHHSANETYQERLARLEGDKESLILQVSVLTDQVEAQGEKIRDLEVCLEGHQVKLNAAEEMLQQELLSRTSLETQKLDLMTEVSELKLKLVGMEKEQREQEEKQRKAEELLQELRHLKIKVEELENERNQYEWKLKATKAEVAQLQEQVKDAEIERLHSQLSRTAALHSESHTERDQEIQRLKMGMLLLANEDKDRRIEELTGLLNQYRKVKEIVMVTQGPSTLSINEEEPEGGFSKWNATNKDPEELFKQEMPPRCSSPTVGPPPLPQKSLETRAQKKLSCSLEDLRSESVDKCMDGNQPFPVLEPKDSPFLAEHKYPTLPGKLSGATPNGEAAKSPPTICQPDATGSSLLRLRDTESGWDDTAVVNDLSSTSSGTESGPQSPLTPDGKRNPKGIKKFWGKIRRTQSGNFYTDTLGMAEFRRGGLRATAGPRLSRTRDSKGQKSDANAPFAQWSTERVCAWLEDFGLAQYVIFARQWVSSGHTLLTATPQDMEKELGIKHPLHRKKLVLAVKAINTKQEEKSALLDHIWVTRWLDDIGLPQYKDQFHESRVDGRMLQYLTVNDLLFLKVTSQLHHLSIKCAIHVLHVNKFNPHCLHRRPADESNLSPSEVVQWSNHRVMEWLRSVDLAEYAPNLRGSGVHGGLIIPRFTGDTLAMLLNIPPQKTLLRRHLTTKFNALIGPEAEQEKREKMDAYTPLTTTAKVRPRKLGFSHFGNIRKKKFDESTDYICPMEPSDGVSDSHRVYSGYRGLSPLDAPELDGLDQVGQIS

SEQ ID NO: 180 - DNA, 540 bp, Homo sapiens
atggatggggacattgatgtttacaagcatttctcgtggctgaagaggcaagaaaacaaggggaacaatttggctgatctagggttcgccacaattcatggtgaagtttcttttttggacctgacatatcccctgaaaaatctcatccctaaaatgcaatgttctccaagagaatgggcggctgccagtgctaggtggctccgtgtccatgtggacttcggcactggggttctacctgcagagcttcacttggacacctgggtcctgtttaattctctgtccactggaaatcaccatcattcccaggtaaaccaccacagtgctgctagtaatgaaacctaccaggaacgcttggcacgtctagaaggggataaggagtccctcatattgcaggtgagtgtcctcacagaccaagtagaagcccagggagaaaagattcgagacctggaagtgtgtctggaaggacaccaggtgaaactcaatgctgctgaagagatgcttcaacagggaaccttcaaacaattgggagcagaagcagaa

SEQ ID NO: 181 - protein, 178 aa, Homo sapiens
MDGDIDVYKHFSWLKRQENKGNNLADLGFATIHGEVSFLDLTYPLKNLIPKMQCSPREWAAASARWLRVHVDFGTGVLPAELHLDTWVLFNSLSTGNHHHSQVNHHSANETYQERLARLEGDKESLILQVSVLTDQVEAQGEKIRDLEVCLEGHQVKLNAAEEMLQQGTFKQLGAEAE

SEQ ID NO: 182 - DNA, 915 bp, Homo sapiens
gggcggggctgaccaggccggtcccccgggaacaggaaccctggtggacgggtcccagcaggcttcttcggtgcccgagagggagcgggtgcccaagggggtggtccctgtggcaggtcccggggtgggggcgcggcgctcccgggaagagccttccgcaggtgccccgccccgtcacgtgggcgccggccccggccgctgcggcaggaaaaactggcggagagcctcagaaccacctgtttcctctgctgcaccatgcttgagtgtggaagccgtgcccctgttctccacagcgtgtatggccattcggcacatgtgtagatttgctgaatgagcaaacagcaactcctccagtttacagactaagaagaggaggaggccaggcaggcaaaaggagtcatggcttctgatgctagtcatgcgctggaagctgccctggagcaaatggacgggatcattgcaggcactaaaacaggtgcagatcttagtgatggtacttgtgagcctggactggcttccccggcctcctacatgaaccccttcccggtgctccatctcatcgaggacttgaggctggccttggagatgctggagcttcctcaggagagagcagccctcctgagccagatccctggcccaacagctgcctacataaaggaatggtttgaagagagcttggcattgtttctccccttttgggccctgcttctggccctggtggacattgaagccatgctgaggggcatgcggcatgaggggcatgaaggactgctcttcagactgggagttccaggaaaccccggaggtgacccccaagggaactgggaaggcccaggcagtcacaagctgtgcatctgcaagtcctttgccacagcagagctcggggccttgcgtgtaaccacagttcccaccgtg

SEQ ID NO: 183 - protein, 170 aa, Homo sapiens
MASDASHALEAALEQMDGIIAGTKTGADLSDGTCEPGLDASYMNPFPVLHLIEDLRLALEMLELPQERAALLSQIPGPTAAYIKEWFEESLALFLPFWALLLALVDIEAMLRGMRHEGHEGLLFRLGVPGNPGGDPQGNWEGPGSHKLCICKSFATAELGALRVTTVPTV

SEQ ID NO: 184 - DNA, 132916 bp, Mus musculus
  misc_feature (1)...(132916): n = A,T,C or G
cttttgacttccgctctgctacactctttctctctcttcttctggtgctgtacattctccccttccaagagctgcttaagaatgctggagctggtgaggacaaggcaccgcaggacaggccgataggccctggggcccacatgtggaaggagaaaagtttgcctctgacctctccctgcaccctcaccagaaataaagattgcttgagtgtgcttgcacacatggacagccttgggctaaagctgggcttgcagacatacaagctagggaaagagaaatacacagggtaccttggaaaaacattgggtgatagctgtgtgaacagcaaataggaggaactgccaaaagactttagttaaataatttgcatctcacatacatcttgatgctaatttcattagagtctatatgttatccacatagagtagtgcctgcctgcaagtctagcacttgggaggctaagacaaggccagcttgggctgtgcaggaaatactctcaaaaagaaaggagaggagaggagagagggggagaaggacgaggaggaggagagagaggaggaggaggagaaagaagaggaggaggagcaggaagagcaggaggaggagaaagaagaggaggagaaagaggagaaggcaggggggagggcagggagnnnnnnnnnnnnnnnnnnnnnnnnnnnnnnnnnnnnnnnnnnnnnnnnnnnnnnnnnnnnnnnnnnnnnnnnnnnnnnnnnnnnnnnnnnnnnnnnnnnnnnnnnnnnnnnnnnnnnnnnnnnnnnnnnnnnnnnnnnnnnnnnnnnnnnnnnnnnnnnnnnnnnnnnnnnnnnnnnnnnnnnnnnnnnnnnnnnnnnnnnnnnnnnnnnnnnnnnnnnnnnnnnnnnnnnnnnnnnnnnnnnnnnnnnnnnnnnnnnnnnnnnnnnnnnnnnnnnnnnnnnnnnnnnnnnnnnnnnnnnnnnnnnnnnnnnnnnnnnnnnnnnnnnnnnnnnnnnnnnnnnnnnnnnnnnnnnnnnnnnnnnnnnnnnnnnnnnnnnnnnnnnnnnnnnnnnnnnnnnnnnnnnnnnnnnnnnnnnnnnnnnnnnnnnnnnnnnnnnnnnnnnnnnnnnnnnnnnnnnnnnnnnnnnnnnnnnnnnnnnnnnnnnnnnnnnnnnnnnnnnnnnnnnnnnnnnnnnnnnnnnnnnnnnnnnnnnnnnnnnnnnnnnnnnnnnnnnnnnnnnnnnnnnnnnnnnnnnnnnnnnnnnnnnnnnnnnnnnnnnnnnnnnnnnncttaaaaacaagaattgaagtcatcacccttagacatgagtctcctgtttgaggatgaatttccacagttcttagtgtgtagttggggctaatcctgggccagatgaagggtttaaaaagcaaaagggaatgcttctttctgttttgttcacaggatggctggatatcctggtcaggcatttggaaggcctccaagaaagtcatgatgagtaagtgagttgggcttggtttgtgttcaagtcctgaattcagggcttttcaaaagaaaaggaaaactccaggaactttcctttccaaatatcttaaaaatgtaaggagcttttgtgagtcaaaaaaaaaaaaaaaaaaaaaaagataaaaataagagactgggttcagctcagtgttagagtcttagtatgagtgaggccctggattccattcctacatcaatcaaacagtagatttaagaaagtaaataggggctggtgagatggctcagtgggtaagagcacccgactgctcttccgaaggtcctgagttcaaatcccagcaaccacatggtggctcactaccatccataacgagatctgactccctcttctggagtgtctgaagacagctacagtgtacttacatataataaataaataaataaataaataaatctttaaaaaaaaaaaaaaagaaagtaaataggccaggcagtggtagcgcacacctttaatttcagcacttgggaggcagaggcaggcagatctccaagttctaggccagcctgcaggtgagatggctcatcaggtaaaagtgcttgctgccttgcctgaggacgggaagtccattcccaggtcccaaatgtcagaagatgagaaccaactccagcaacctgctctctaaccttcacacatgtgtatcccagacacatataaaatataacaaatgatgtaatttttaaatgctgaaaaaagagagagcaaatagcatagaatttgtgctagagctcacaaactatattttacactatataataatatagtgtaaaaatgctgtgtgtgtctgtgtgtgcgcgcacgcgcgcgcatgttaaggctggaacccagggcttcatacatgaaaggttactgctgagttatattcccagcccctgtgttgtattttgtttatttattgcttaaggggcaactgtaacacgttgtacttatctctttactaggcagtgatctcatttatatgtgaatgcatgtcccttacaggcgtgtggacactttaaaattcagacccccttcttgctctgtgtctttagggctcagtgtgtaaactcattggcaacatcaaaggttgaaacctgagcctctgtcacatgtgaggttggggccaaatgtgcttgcagtccctgtctctgctcttctctgcctggccctgtctgctctggctgggtgaccttgagcaaagcagttaggcttcaactccatagtcctagtcagtaattcctcattggcacccacctcatagtgtggtttagacaactcccatagtattgttcatttggctcagggggaggcatagcaaacgcttaataaatattagttcaagtcagtcactattattggaaccaagactcaacgtcttgtccaaagttcactcaattggtctgtgaggcttactgccccaccctaagagtgttcattctgagttcagtcaacacatactcttcattgaatgactgtttatttgtatagtagagttagttgattctctcctgtcatgtgggttctaggaatagaacataggtcattaggctcggtagccaactgattggtcacaactggtcaggctattacccactgatcctaacagccttttattctacttctgtgatattctgctgggtaccagagacagatggggtagggctggggcatgtgtggcctttgcttttacaaagcaggatcctaagggacaagcagatgatacatgtgcaaagaaacctaacacttgcggatggtgacagggactaccaaagaagtagggagtatgacagcactgcttagcttttttgtgggacacagaggttagaataaaactccttcctgagaaggtcccatgagccttctaagacagggcagggccacagcaaggcaaagaagctgtttagagcctcaagttgaaggatggttccacttgtgggattgtccaagtgcaagcctctccctagttacattttgcacccaagcactgtagtcacctgtctgttggttctgttactggtgggcattgagtataggaagggcatttcaggcagaagaggtgcaggcacaagtgtagatgctgtgtgtatggtggcacaggacccttgaaaattccagctccttggcagggagaagcagtttttaagcaaggcctgtctgaactgcaatgtgagtttgaaaccagcttgggcaatagagtgatgaaagtctcaaacattctttttttttttttaagattcacttttcttttctaatgatgtgtaatgtgtctatctatgttggggttgttcgtgggtgaagacatatgcacctggagtacaagaatgtcagtattcccatttgcggaagttacaggctctgtggcctatctgacatggatgctgaaaactgaacttggggccactggaagagcaggaagctctcttaaccactagccatttctctagccttgcctcaaaattgaaaaaaataaaaacaaatgggggtagcacacacctttcatcacagtatttgggaggcagaggcagactgatctgagtttgaggctagcctagtctacagagggagttctgggatagctagggctaccctgagaaaccctgtcacaaacaaacaagaaacaaaaacaaagagagagagagagagagagagagagagagagagaaagagagagagactgggaatttggatcagtggtgtggtagagtacttgcttagcatgtgagagacttagggatcaatcctcagtgccttacaaaaaaaaaagaaagaaagaaagaaagaaagaaagaaagaaagaaagaaagaaagaaagaaagaaacaagaccagctgctggacagacaatatttgaggtccacaaattccatccttaaaacaggaatgggctagaaaaatgctagtagagctagggaggcaaaaccaccaaaagaaatgaggaaaagactctgaaaaccttacgtttgacatgaatagttgtattcaagtagcagttagaacaggagtgatcagaggagggctgcctgcctggggtttgtcaactttacacaaacctagacatatctggaaagaagaaagagacagggcttatctgtgtaacagccttggctgttctggaagtcagaccaggcgggtctggaactcacagaaagcctctgtctcccaagtgttgggattgaaggcatgtgcctcctccacccagcgaaacaaggaatcttaattgagaaaaggcacgcataatattgtcctgtaggcaagtctgtagggctttttcttgattgaccattgatcattggaagggcccatgtcattgtgggtagtgtcattcctaggcaggtggtcctggatgatacaagaaacttggcaaagcaagacaggacaacgagccacaaagcagcacgcctccactgcttctgcttcaattcccatctccaggtttctgccttgacgtcctttgaaggcggattatgatggttaagtataataaaataggcgaaattaacccttttcttcacaagttgcttctgagcatggtattttatcacctcaaatagaaagttaactaagagatactgttgcttcagagggccgaagttcagtttcctacacccctgtaaggaggtgcacaagggcccttaattccagcttcaagggaattcaacgcctctggcctccgagaacacatgcgctcatgtatacatacccccaccataaccacatacacacaaaatcaaataaaccttaaaaaaaaagaacgaggctctcaatttccattcccttatcctccggtggtttatcattgcctttataattcacagtgcttggagggcggtggggtagagaggtactgagaactgcttcaccactcaagggctctcaagtggtgggttatcaactgtggccacccctgggaatgccatagggagggagccgaggagtcagctcaatgggtaagagcatttgctctgaaagcatggtctgaattcgaacttgtagcatgtacattaaaagctagacagtgcccctatgacctcagcctgggggcatggaaaacaggaaagcatgaaaatgtacacacacacacatacacacacacacacacacacacacacacacaccttgtgcttgaaaatgtatacgcagaggcagccctggggaagtataatcactgatgtgtgggacctacattcaaggcttctgatcagtgagtgtctgagatgaggctctttttcttgcttttaaaaacatacttcagaggatggcttatggcagtcagggctctccctccagccttacgtaggccgtgggattgaacctgggtggccaggctttcgcgctgagtaccagctcagcaagttccttccttgtaggttcccacagcagcattattgaggaaaagatattaaccatttgggatgcaaactgctaaagtggtttctagcaaaggtctgctgagtgacactctcacacatactccagcctcacagtgccctttgctagcactgcttgtgaagggttatttctaagatgaagcacccacaatcatttggacacatacacaccccaaacagataagaattgaacaatgggatgtaatttctgctagctctctctctctctctcaacaccttccaattgccaaaccaatagccatatgcttcagaaaaactacagacttgacttttaaaaatgtatttacttcctctgtgtgtgtgtgtatgtgtgtgtgtgtgtgtgtacgtgccccccgagtgtgtgtttctatgaacacattggggcacacgtggaggtcagaggacaacctgcaggtgttggttttctgctactatcacgtagatcccaggatcaaattcagttcttcagtcttgatgataagtgcttttccttgctgagccacctcagtggcccatatatctgatctttactaaaggatttctgattctagttctatggacctgcatagagtctctaagaaggcagtacaactaacatctccattttacagtaagagtcaggagcttgctaacaccccctcttcttgtttaagtcaaagtatgaccttggagctgtcccttggatcgctttgattgcattttgtgatttgaataggttaaaagagacgtgtgaaatttttcttaaaagtctaaggttctggttattctgctgttaatcgatttggggctctaataattgacatattatgcttgtcatttgcatcaactacttaaggaaggcaaagagattaattggacatattaaccccttcttaatgggttgaaatgagaaagaggcaggatcagttcatctggagcagaaaaagcaaggactctgaagtaaagaactaggaacatagtagactacttgcctagtatgcatgagaccttggatttgatccctagtaacataaaaaattggtccagcatgggctatataaaactctggcaaacagacaaacaaatgaacaaacaaacaaaccaacacactgtgagggaaacaatctaaaaaccagactttggaactgaggaatggcatcaggcaaaaggcacctgcagccagactgagagctgctctagcagggagcgagaggggacctgaacaaattggaggacttcagtcagttctcatgataggtcctgcccttagtgctttctccctaagcttcttgagggctgggtgctgatggctgtcctagtgtcaatttcttggttagtaggtactccatcaattttgctgaatttcgactaaaagaccaaaccatgattagatgacatattagaatgtactaaggactggggctggagagatggctcaacagttcagaatatgtaccccatctatatattcttattatgtagtctggctgtcctggaactctctgtatagactcacactcacagagatttccctgcctctgtctccgattccccagcttaaaggtgtactttacaatacagggctcaagaacatacactgctcttacagaggacctgagtttggttcccagcacccactggctggctccaaactgcctataactccggttccaggagatccaacgttctctttggactaatagtaccctattagtatttgctactccccactcctataattaagaataaaatacttaaaaaatactagattatgtgtttatcattgcttctataattaaacacacaagtaacaaaacaagaataccttctaaaaatccaggcatggggctggagaaatggctcagcggtgttcttacaccggtttctcttccagaggtcctgagttcaattcccagaaaccacacggtagcttaaaaccatctgtaatgggatctgattgattccctcttctggtatgtctaatgacagccacagtgtactcatataaataaaataaataaatctttaaaaaaaaggcaaaaccaggcataatggcacatgcctgtaaatccagcacccaagaggtagatgcaggagagttatgagttggagcccagctgtgctttttaacttatgcacctggtgggtcccttccttgtatccttttttcagtgagaagtaaattggcatttatgaagatgcccagagcaatttcagtatggaagcaatcttattgaagtaacgattattattttacagcactggcgattgaacaggaggcctcaaacatggtaggtgaccaaactgctgcaacactgaactactttccagctccattattgattttttttttttttttttttacagtaggttggtgaccaggcctgggtctggccaattccttgtgggaatttctgtcttgagtcaaagatcgtatttttcagaagactttccccccacttcttctgcaatggtgggcaatgtgggtggcagaaagagaaaaaaaatcatttgattgtcttttggaatagcaggatcctccttcattgacggatttgtgggcatactcaggatcagatggtggaaaaatgtaagggatatactcatagggagatatcgcctgataattaagtactttagtgatagttttatttcttgggggttgggtaggcagtgtcccatgtaggccaggtttgcggaaggtgagcctgaacaacttccggtttccatttcttgaatgctagggttacagacacatcgtcatgctgcatttatggggtgctggggatggaacccagtgattcgtgcttgctcctgctttgagcattctactttctgagccatgtccttggtaacaattttgaattacttaagtgatgtatacatacttctcttgtgaggcaaaacgatggatggcctaaaaactttatgtggaaaaggtttaaatacttgcttgatgtgtatctcggctatttttaaagttgagcctgcagctagggagatagctcagtcattaaagtgcttgccccgcacacacgagaaaccacctgaaaaaaagccagaaatggtgtcaccgtttgtaaagccagcgttgaggaaacagaagattcgtggggctctctggccagctagtgagagagagaccttgcctcaaaatacatggtagctggaggcttatgagcaacacttgaggttgttctctgtacttcacatgtaaacacgcacacaaaggagtatattgcgttcacataatgtgcccagtgctttatcgaattctttcaggagagtgtgggtaacaggcctcttactactagaaggaaccagattacagagcacagttcatggggcaggaagcaggcgttgtttttcacttttggaaaatatgtaccaggactgcatgacatttcaggtaggggttgaaaaggtgtcgctttcacttccccttcctcgattttactattctgactttttctcttaagaccgtggcaggcaggtggacgcacgtgagcgccaagggcacatctgtgtgcgcgcattagcgctcaagggcacgctccccctcctgtcctccattggacgcctgttcacacctgactgccggtcctccgagtgtatgggagggcgtgtgtggacccggggtggagatcccctctcccatgatgccccgcgacgagtccacattgctctctaccacccgcagacagagctgctgctcaggaggcccagggaggtccgctcgggtccctgctctccagtagttctcgccttctcctcaaagccccaccccttttagctacgcgaacgcggacctcgccttgaagtctaggctctcagaactccagtgcctctcgagcaggtcccgccttttgactttcgcccctcccctctccaggttcagcagccacagaccacgccccaactagtcccgcccttcttctccaggcttggggcgcgccggcaccgcccctcctaggtgaccctacccctgtcataagccccgcctctagtccatattctgtgaccaatagccccgcctttcaccccgagccccgcccctctccaggctcctaggggcgccggcaccgcccctcgctcccagcatgccgtgcggcagcggcggcgcggcgggcggagccgggaggcggggaagccgtggccgtgtgagnnnnnnnnnnnnnnnnnnnnnnnnnnnnnnnnnnnnnnnnnnnnnnnnnnnnnnnnnnnnnnnnnnnnnnnnnnnnnnnnnnnnnnnnnnnnnnnnnnnnnnnnnnnnnnnnnnnnnnnnnnnnnnnnnnnnnnnnnnnnnnnnnnnnnnnnnnnnnnnnnnnnnnnnnnnnnnnnnnnnnnncggaacccggaacggccgtctgcctcccccgccctccgccgccccctccgcggcttcctcctcagccccgggccagatcgcagtgtcggcggcggccggttcaggcggcgactcgcgcttcttcgggcggcggcgcttggccatgtcgtgtcggggaaggtaatgagccgcagagccccggggtctcggctgagcagcggcggcggcggcaccaagtacccgcggagctggaatgactggcaacccaggtgggtgaccgcgtcgagcctcgcctggagctggccgaggcctaggcccgcgggactgggaggcgcggcctaggcccgcggtccctggagccgggcgcggcttcctgggtgtcctccgggcctggtccggcaggaaagctgcgggcagcggaggcctctgtgcccggctggccgcctcagccggatggctggagcagtggctctgagcttgggtggaggaggacgttccactgccgtctaactccaagttgagatttgaggtccaggaaccctccctgttacctattaacttcctcggctccgcgtccagtcctcatgccaaagaccaccttaactctgcgtccttctggactcccacgtgttaattaatgtattttaaaagctgagaactctaccgaggtcttcctctgactttagacagatgttagtcgaccaaaagatgagattatgggactgtgaatgaaatcgacacaatcaggcactggggcattttaagttttccccaactgcagaaatagtttttctggaaacagtaatttcccagggcgctttggagtgaatttgtattctcaggagtagagaaatttcgttttgcatgaaggaattggagtctggttggatttaaaatattaagagaaaaatacgaaagaaaaactatttctagtcagttctttctgattatggactggttatacttaatgtaggttcccattctttgctgagtaaaggcttcaagtattcagagactacttgagctttaacagtgcctaggacttcctaaatgtataaaacctgtctttcagtagaagttgatgtattctttgaagtacactccgttgttcagaaattggccacgtgaatggaaagcgtacactttttggtgttggtcttgctttctagtagatcctcctaatttcagaacagcttggaagtggagtattttagaagttagtgtgttacattttaagagttggtagagaaattaaaatgctctttggctaataggggtacacttattttgtttaacgtgcattcctaaacattgtgtctcttgagaactgatgtttgtgactaaatgattgtaaaaacgaatgcctaagtctagatttgagatttgaagcagttataaggagtgtttgcaaaatcatcgctttgacttgccctgcatgaaggtttgtgcagtgcgttaaataaaacaagttgacattcttttcattgacatgctttgatttcactgttattgaaatgtgtgaggtttgattttaagcagctgacacattaggtgataaatgaacttgaatttgacttttgatagagctcttatttaaaaatggattctacagctggctatggtggtgcacacttttaatcccagcacttgggaggcagaggcaggtggcttcctgagagtttgagtccagcctggtctgagttccaagacagccaagataaacccttgtctcctgtctcggaaaacaatggattctactatattttagcatattatgacctgtatacacacacacacacacacacacacacacacaaaacacacacagagcagaatggcttatatagttaaggaatatgtgcataggttgttagttaatgtcacctatgtttcaaatatttttgtttcttggcatagtgagggtgtatggggaaaggatgaaaactttctatgagctctgattgaattcttggatagagagtacgactatgatgaggtgcacacgtgggtttatggagtacaaggcaggagtacttgctttctagaggaaacaggaatatacacatacctcatagcaaacttggtttatttgtaacatggtcaggattgatatgctaaatagccagtggaaaaaaactcaagtttgtaggtcataattttcatagtaaaagttgaagtcattctctctcagaaagatgaatagctaatgatagaatggagacacccccccccccaaacacaccttggccaagtgctttttccaaatattttctctatgtacttacatagagactatagtttattcaaatattaaaaaaaatcttttatttatctgtgtggtcatgtctgccacaatgagccatgagtgggtgagtgaatagagatcagaggaccacacatagtctgttttctttttctgccatgtggattctgtcaatttaactcaggtcatcaggcttggcagcaagtgctgaggagccatcttgctgacccttgaatcttttttttttttttttttttttttaagatttgtttatttattatatgtaggtacactatcttcagacactccagaagagggcgtcagatctcgttacggatggttatgagccaccatgtggttgctgggatttgaactctggacctctggaagagcagtcgggtgctcttacccactgagccatctcaccagccctgacccttgaatcttaaaaaaaaaaaaaaaaaaattactagttttatgtgtatttacatgtgcccatagtttatgtatgtacaccatgggtgtggtaggagccaggagaagtttggtgatgagggagttaggtctctggactgaagttactggcagttgtgagtcatcatgtgggtgctggtaaccaaactctagtcatctgtaagatcagcagctgctgagttctctttctaggccatcttcttctttttttttgggggggggggtcttgtttagctgaggatgaccttgattgagctcctgatcttatttccacttcccaggtgctagcagtttaagtgtgttactgccaggcctatttttttattcaaataatttttattaaaaacaattattcgtcctttctgtaccatttccccccccctctgatttttatggaggggcaggtgaggaggaatcagacaactgagaacttaattcttggggtgggaatgcatgaagcagccctgggtttgatccccagccacatagccagggtgtggtagttagtacataccagtaattccagaagtgatgtttttcattagatcagaaattcaaggttatcttcagctacgtagtgagttccaggccagcctgagctacacaagactcgtgtctcaaaacagaaaaaagaacagcagttcttgtcagcgtctttaaatattagtttggcagtttgtcctgtcgtagtagaagtaatccctcttacatatccacaggtagtgtctttggtctttagtagctgaatagtgggctactgtgataagagcaagcttaccaagaccactagaaacagtctttaagagtgtttacagagcactgggcttgtagtcaatcatgtgtcctcccagggtttctctgtgtaggcttttctggaacttaattctgtagtccaggttgtcctctaactcagagatctttctgcctcttcctcctaagtgctgtgattaaggtcatgttccaccactgcttggttgtagtcttattcactgtactctcctacagaatggttaggtaagagctttgtgggctgtggtgtcttatacctataatctcaatacttgggaggcaaaggcaggctgtatagcaaagaaagaaatgagtgatgttaggttttattattatttacttgcaacctgttattatcttagacaaaaagttgggaaaattttgggatcttcccaaccattttgtgctgaacagagacctatctttgccactagccaaagtgtgctatttttggatttttacctgtatggaaaatacctagttgtatccgaagatagagatcagaatgcttcaagagttttttgagctgggtgtagtggtatacaccttgaatctcaacactctagaagcagaggcaggtggatctcttgagttcatggccagccaaggaaagctacagagtgtgtgaccttgtctcaaacaaaaaaaaattttttttttttttgaggaggtggagagtttggtcagtgagtaaaaaacactcagcagcaggcctgtgacttccatataagcacgaaggcacacatgcacctgtactcatgcatgcacacacatagggtctcatatagcccaggctgaccttgatacacatctgtaatcttaaccccttgagtgctggaagttacaggtatgtgccacatgtcctgccagaattctttgtttgaaagttaaatgtggggctggagagatggctcagttctcagtactcactttgggcagctcacaattctctgtaaatttggcttcaaggcatctacacacacacatacacacacacatacacacatatacatattgaagaaaaaaaatgcattcaataggtcttattcctatacttggaagtcttagatgtttagcacatatgtattgttgtattgttatatattaggtagcttgtagtgcccaagttttacctgtctagatatttttttgagacatagtcttactctgtagcccaagctgagctcaagcttcaggtactcttccctcagccttgagtagcgggagttactgggatgtgtcacagtgcctttctatttctaggcttctaaatgaatgaaacagtactagagctagttatcatttttagtaccattttaccaggtcaaagttctaaggagtataaaactccatgtgaaagattaaaaaatagaagtgttgggctggagagatggctcagcagttaggaacactgacttctttcagaggtcctgagttcagtttccagcaaccacatggtggctcacaaccatctgtaaaatgatcagatgccctcttatggtgtgtctgaagacagctacagtgtacttacatataaatatataaaaataaataattttttaaaagttgtgaaattagttacatttaaatatataaaaataaataattaaaaaagttgtgaaattagagttagaattttatgtctggtatgaaaagttgggttttaagctgggtaatgatgatgcgtgcttttaattccagcactctctgtgagttccatgacagccttgtctacagggtgagttccaggatagccagggctatatatgcaaagaaaccctgtctcaaaaaacaaaacaaaataaacaaacaaaaagttaggtttctaatttggagacaggattctcactactatagcccaggcttatcttaatgctccttgctcaatcagcttgtggagtgctagcattacacaggtgggcaggctgtatagcctggctgacctggaaatctctgtgtggaccagggtagatctgcctgcatctgcctcccgaatactgggattaaatatgtgtgccacctctgctggctgatattaggtttatgagatcagaattgtatgttatacttttttgtgagtttgtagaaagtctggtgtccacagatttgtaatatactgaataaaaaacagctaaaactgaacaaccacatatctcattgctatgaatggaactttaagtagaatctaataattatgtttgaatttttgtttggtccttcttcgtcaacctccaagtatcaggaaacataactgcagcccaccaaactccattgattatcatttttatcagttctatattacagattcctgagtgcattgagagttttcaactaattgtatatgagtgattttttttttcagaacttaatattttcattatcttataaaaaacatttggcaattatatttttaagctgaatgtttttaccctttaattccttaaaagaaatctttgtgtgtaagtgagagagggggtaggaggatagagagacatacatgtgacacaatgtgcatgtggaggtcataggacaaagttgtgaagtcagttcttcccatccacctttatgtgagttctggcaataaaacaccagccaaccatcatggttactgacagcaagtacctcagcccatgagcatcttgttggtccttcattcctttctaaaattgcagagagcctgaacttcaaattagtatttaaactattaattttcatttttttttaaaaaatagtgtgtgttttgtatgcctgtgaaacatgtgcatgcagtgtccccagaggccagaagagggcattggatcccatgggattggaagtcaagatgattgtgggtgctagaaattgaacctgagtcttctgcaagagcagtcagtgcacttaactgctgagccttccttaaatccctactttaaattttaagaaatcataaaatagttttaagtgtgtgaatatgacctcaccagtaaatattgatactttttagggatatttttgacttgcaagtgtgagaaataaagaatgcttttaaaaatgacagcatactatactctaaggccttatcgacatgtatttgatcatagaaactactgaactgttctccaataaaaatggcaaggtatagtaactatttctatattaatggttttagaggaggaaagctatacatcttagtggaagtcagtagggtgatgaaattgttctatatagttttcatggtaagcttggagaaaatcggaaccaaacaaagctgctgtaaaatataagctgtcctcaataaataatatttatttagaggcagaatgcttgtaaggagtaagctggtgaaggtgtgtgggggtggactggaactacacttgttggctttggtcatagttgaagtgtaattggaatggtttgaggagctgttgttaaagtcttactagcagcaaattggcttcagttaggatgatttagtctgttggttcttgaagggtgtgtaagtattgtaagtacagttgggaaaacctagacaagagactaccgaggacctaagtcatgtattctgtattctgtttatagtacatgattgaagctcagacaaaaagtgttcccagtatgtagaaacttgggctagcataagcccttcatttgttgtctagtgttggttaagggtgactacttatgtgagcctttctgcttgcccacacttaattcaccttagtaaatatgacatgtcacacctataaaacagatgtgaccatattgtcttttaagaacactgaattcttacagtgctagggttttctgcctcccctatcctaattaccaaaaaaacagatccaaggagttcctgtcactgaactgtccttgatggagtcacacaaactgtatgtttcagttcttttcatactgtcattattttgattacctgaaattggcttcattttctcaaagcttgttgtgtttttggaactacaaaataaggaaagaatttctcttgtatctagacctaaaggcagagtttagaaaatttgtagtttaactcttgtttttgttttgtttttttcaagacagggtttctctgtatagccctggctgtcctggacctcactttgtagaccaggctggcctcaaactcagaaatgtagtttaactcttaacaaaatacctcagcttactatatcttgttttgtctttagagtgtaaccagcttagaacactttgtttactcagaactgtttggctttagaaagttctgttccctcttctgtttatcgagtgaactcttaacatgtatgtatggttcattttttgagttagtgactttttttttttaatggatgtgaatacctctgtaaccaccactctcgaccaggagactcacttttcaattggattccttgtccctgacattgctgccagcaccagcatatggtgagagcatacaatgacatttgttttttacatttttaattaaaaatttttttttaaaaagatttatttattattatatgtaagtacactgtagctgtcttcagacactccagaagagggcatcagatctcattacggatgattgtgagccaccatgtggttgctgggatttgaactcaggaccttcagaacagcagtcagtgctcttacccactgagccatctctccagcccctacatttctaatttttttgtgtgtatgtatgcgtgcacatgcacacaaaagtgcctcatctcatttgtggaagtcaaaggctgtcagatgtggtattaagtgcctttaaccaatgaaccattttattggtcctaccataaaatcttttgcagagaggatatctttacatggtgtgtccaggatttattataagtttggactttattaggtttttgggtcttactattttcagtgtgtcacactattgctataaacattgcttgcttgcttggaatatctgaagagtgctgtgacatatcagatggtagacctacaacattatcatttttgggtatatgggttctggaccacataggtcctcatttggctaagcttattctaggagctacagattcctggccctctaaccacactcttcctttttttttcacatatcagatatttacatttcagttcataagagtagcaaaattggccgggcttggtggcacacacctttaatcccagcactcgggaggcagaggcaggcggatttctgagttggaggccagcctggtctacaacaaagtgagttccaggacagccagggctacacagagaaaccctgtctcaaaaaaaaaaaaaaaaagtagcaaaattatagttgtgtagtagcaatgagaataattttatggttgggggtcatctcaacctgaggaactgtattaaagggttgtagtattaggaaggttgagaaacactgggttagagcgtctctgaatgtcttgtattctcatttgcaatgtcaatgtgtgttgattagagaatgctagccaaaaaaaattccactgtacactgtcagtgcatatgcagtgtttttcaggtacactttggtcataggtcatagattggtagaggcaggacttagagctggcaagtttttttccctctatagctcctgagtttataaatctgttaccttagaaagcatttgaaggggatttgttcttgtagtaggccagttagcctcaggcagtaaattatacagctgattaaacagttgcaaccaggtccttaatagaaggaaggatatgctaattaaaattcataggttttattaatcttgaaaaacaccttgctcttattttgaaattcttttctacattagtctcttaccccatatctgctatatctatccatattgcttaaaacagtccattcactaaaatactaagtactgggttgaggttgctgatgtcctggggcagtggcaattctgcacttggttggaggaatgaaaccctgcttcccagagccaacagattcattttgatgcctatatcctttcaaaaagtaaaaaaaaaaaattttttttttgagacttgtagaccaggctggcctcgaactcagaaatctgcctgcctctgcctcccgagtgctgggattaaaggggtgtgccaccacgcccagccaaaaagtaaaattaattctggtaagctagtactccacattattcatcatatagctgggaccttgcctcttttctgactagatcactggtatcacagaattaatatcaatatttagttgaaaagaaagcaatctagaatatgttgtaaaaaggccagatgcacttcttgtcttgtctttactgttctgaggaaaaatgaagatggagtaggttttcagtggcagcaggcccatggaacttgattttattttattttattttattttttgagacagggtttctctgtatagctctggctgtcttggaactcactttgtagaccaggctggcctcgaactcagaaatcctcctgccactgctgggattaaaggcgtgtgccaccacacctggcacatgctctatttttaaaagatgcggttgtacatgtatatggagtacaaagtgatgtttagataactgtacttgatgtatataatgctgatcaagccaactactttttgcttttttggagaggagaagagctctttgaaatggactatttttttattttttattattttggttttttgagacagggtttctctgcatagccgtggctgtcctggaactcactctgtagaccaggctggcctcgaactcagaaatctgcctgcctctgcctcccgagtgctgggattaaaggcgtgtgccaccactgcccagcgaaatggactattttttaattttatttatttatttttttactgttgattgattgatgcagggttttcactgtgcagctttggctggcttcagattgacatcttccagcctcagcttcccacatgctgaggtacaggtgtgtaccacacatacctgcttttgaaatgcacttcttttggagtattttgaagtacaaagcacattgtctcagacaaagtcattttttaaatagcaagatctggaaacatttttttccacttgagactttgtactcctttaccagcaacttcccttttttctcaactcctgtggtttacttgcatttgacagaggccagttttttcagctacactggagactgaagtaggaggatggaaagttcaaatactgcctggcctgcagagcaagtttaaggccagtcaaggcaacttagtaagaccctgtctcaaaaaaaaaaaaaaaaaaaaaaaagaccctgtctcaaagtaagagtgaaagatggagataatggtagcatattgacttagcatttgtgattcctcagattggatccaaggcagcaaagaaggtctacttggctgtattagcattggtattagaaatagaattgtcagtcagggctggtgagatggctcagagggtaagagtactgactgctcttccaaaggtcctgagttcaaatcccagcaaccacatggtggctcacaaccacccataatgagatctgatgctctcttccagtgtgtcgaagtcagcttacagtgtacttatgtaaaataataaataagagctagcacggactgagcaagtggggctgatgagagcaagcagaggtcctaaaattcaattcccaacaaccacatgaaggccctcaaccatctgtacagctacattctactcatatacataaaataagtaaaagaaatagtatcaccttgttttagaatctattgtacatgttctgtactgagtcctcatacatctcttaggaaagactggtgtcatgaactagagtaaggatgggaagacaggaacctcttcagttggcatatagtctgaagatcagatccaggttaaagataatgtttgggaaaactttcaaactgataaaagcacctcataaatgtgagctcctggccgggtggtggtagcacaggcctttaatcccagcacttgggaggcagaggcaggcagatttctgagtttgaggccagcctggtctacaagtgagttccaggacagccaggggctatacagagtcttgaaaaaaaccaaaaaccaaaaaccaaaaccaaaaacacacaaaaagtgagctactatgtctttaattaatcaattattattattttttattattattatttgtaagggggcagtgctggggatagaatggaggatcttattcagacaccctcaccccagccccatatttggaattttaaagaacattctgttatctcttcctctaaatgttttagacacacacatacactctcacacatgtaggtgcacatacactcgtgtgttatgtagctataaattttgataaattttcattgttttttaaaggatgtatgacattaaatttaaatctcttctaagcacgtggcatttttggtattacttagctataaaatatggtgggtgatagattgcactatagtgtaatggtatgtttcatagtctgtgtccttgaaccagaaaccaattttatattgcttagtaagggatttcagcatatgtgaatctgcttgcttttctcttcatgtcttaccagttcattctaagaacctgctaccaagtgctggccatggtggcatggttttagtttcaggacacagaggaggtcggatctctgatttcaaggccagcctgttctacatagggagttccaggccagtcaaaggttacatacacatagggagaccctgattcaaaacaacattaaacaaaacaaacaactggctactggttgaaagtataagctagggaaaataatctaatctttgtaacgttggatacatttggagagcaggggcatggattaaatcgctactttgtaggtttataggtagtgtgtagtttgtttaactttcatcatgcagttaaactaattctttagagaatctttcctcctctagtctagggcctgtgtgaatgtacagttttaataaagtagtaagaggtgacagtgtcatgggaaagttgtatttgaggtggcacagctttacagcctttgtgtcttttaaaaagaaataagattgactgaggtggtgtatcaatgtaagaatgtgtgtgcactactaggcagattttggtaggatttaaaattgtataaatttattgaaattagcaaataatgccttttctaaggagcttcatatgtacttttttatctttttgtacaaggaaattataaaagtttattttaaattaaatgattaaatgtgtttagtataaaatataacaaaaaaggagtttgtagattttgtaggtctgaaataacttaataggtggtgttaagatgtttctagcttccttaagtttaagctaaccgttaagtatgtcagtatttctgtggcctgctgagcacagctggactctcccacttttccttctgggactctgatactgtttcgggtttttagtaagttctgtgcaactctcttcagttaatgtggtataatagtgtgatcttgtgtcttttcttagtagttgatttataatatgccttctgatatttatcttttttttttattaaaaaagtttaaaaagtgtgttttgtttgtatgcactacagcgtgttcatgaggatcagtgggagctgcttctttaaccaattgtgtcctgagagggagattgagcatagttcattagcctttttaaaatttttaaagaattactttgtgtatgggtattttgcctgtgtgtatcatccaatgctcttagaagccagaaggtggtattggattccctctggaactggtgttacaaatggtatgagctaccttgcaggagaagttgaagtcaggttctctggaagagcagaactgcgctgagcctgctttccagccctagttcatctagcaggcaccttaccagctcccaatacttgttttttaaaacagtagttggaaacctgtttgctaccccagaatatttaaggagatatgtcctgtgggagttactagagatgttgaatcagtcaatttaaaaatttgcgtatgtctttgtatgattttattggcaaagttagaaaatcaaggtgttctatatgcttttacaaggttattttaatgtgcaaactgaaaactgcctctagatgtttctggagatgtcccctgtagagagccactgatgtagattctaagcttaattaatgcctcttcttgtttgtcttaatgtttgaacatgtttcaagttaggctgtatcaggtagttgcttagaaagaaaggttggtgctggagagagatggctcgatggttaagagcactgactgctcttccgaagatcctgagttcaaatcccagtaaccacatggtggctcacaaccacctgtaatgagatctgatgctctcttctggtgtgtcttgaagacagctacagtgtacttagatataataataaataaatctttgggccagagcaagcagaggtcccgagttcaattcccagcaaccacatgatggctcataaccacctgtgcagctacagtgtactcacatacataaaataaataaacaaatctcttaaaaaaaataaaaggaaggttggtgcccctgacctgtggtataccatctctcatggtcatactaatttggtaagattctctttctcctttcctccttccttccttccccctcccttcttcccccttctccgtttatagaattgcatgttttatgtgtgtagtgttgctcatgtgttcatgtctgtatcatatgcatgcttggtgcccaaggaggtcagaaagtgtctcatcctctgacaaggttgttgtgctagaagtttataactgtttattgttggttttggcagcacctggatgttactgatccaagtttttctgggtgctttgaccagatggagttatggatggttgctagttgccatgtgggtgctgagacttgaccctgggtcctgtggaagaacagcacatactgttaacagatgaaccatctctccagtccaagagagtttgttgtttaagtgtacatgtccaagtctccaagtgtattatcctgaacatgctccatctcatcctaaagtgacatgttcaaattacacattatctgtaattttgtggcaccacatcctttttttttctgcttttgtctcacatgaaaattagcatcttttacatagcatttatttttatttatatttatattttttatttttattcatttattttttggtttttcgaggcagggtttctctgtatagccctggctgtcccggaactcactttgtagaccaggctggcctcgaactcagaaatccgcctgcctctgcttcctgagtgctgggactaaaggcgtgcgacgccacgcccggctcatagcatttatttttgctgtttgtttttaagacagaatctcactgtgactcaatgtttagcccatctagcctggtgctgctttagtgctgcttaaatttttaattttgcattatcctttagtggttcgttaatgagaatttagactattcatttatcaaaataggtgatagactgttacaaacttatggatttattataacaataattacttattttaaataaggtgctctgtggactttcagaagtttctcagtcattgtcaatggcaaagttgctgttgtgctagaagtttataactgcttattgttggttttggcagcacctgtctttttctggttcaagtttttctgagtgctttgtccagatgtagcttgcagcttcagttcttcctatgggctatttctggggtcagcaacttgtttcactggagtatagtgacattaaaccagtgggatggtgcttatgttttcttaaaaagtgggcagtataaggcatggtatcctgaattattcaaaacaaaacttgctttctttgaaaaccttaccataagaaaggagtttattttttgaggtgttgaacctagggcatcatgtatgttaaaagagtgttctaccattgagcttctgccctagctgaagggcaaatactgaaaaaattaaaatgactttgatggaagtgatgctgtgtagttcttttggttttgacaaatgaatatagtagtgtaactactataaccaggctataattattctcttagaagcccctgtgtccttttgtaataaatttctgcacctagccagtgcttcttcatggtttagaatatcacaaataagaatgtggttggttttgagggggtggtaaaatgtatataaaacgtgccatttgttgacatctcgatgttatgcagtcattgagcacttgtatttagtttgaataaccctatatccactaagcagtcactccacgttctcactgtgatccagaacatgacaagcacagccctaccattgtgaatctgttcagtcaaatgagtagaactgtgcagtatgtggccttttgtttctggctaatgtcgcttagtctgatgtttcccactttaactcaaggtgctgcatgtgtgagcacttcattccttcttactgctgaattatattttgctgtatgatgccttgcatctctttcttctcatatagatgtccacctcttgactaataatgtaactgtggtggtagaactttgtgtatgcttttattgcaacatgtattttcaattttgggcatatatataccttgagagatttgctggtctacttgtaattttctgccctttgaaggatggtcaaactgtttcctgaagtggctgtaatattttacatcctcatagcaatgcagaaaagctccagtttcttctctacatccacataaaattttgttctttttgtttttattttcagttttaagattctgattattgtagttagtaaatttcccttgtagttttgatttgcattttcctaattatagatgctattgaatattttcatgtgctcattgaccctttgtctctgtctctccctttcctctctcctttatttcttgttcttgagtcaggcctcctgtatagcttggctgcctggatcttgtgttctttctggttctcctaccgcagcctcctgagcccatgctccatagtgaaattagatctttgtagttagatctttaagctaaaagataaaacttaatacatgtccattcaccatcatctttttttttaaagatttatttatttgtttattatatgtaagtacattgtagctgtctttagacactccagaagagggagtggagtcagatctccttatggatggttgtgagccaccatgtggttgctgggatttgaacactggaccttcggaagagcagtcaggtgctcttacccactgagccatctcaccagcccccaccatcatcttctaaactcccattctttcttctgccttcttttctccttgtagcaaaaactgcatttggtcttctaattggaagagcatgtggttgtatgatagtgcctcttgttgttagtggtaacatctcaagcaagtgagcagctaaaaccatcctataactaattagctagctagctagctagctaactaactaactaactaactgtgtgagtttgaaaaaggagctaatggtgggatttttttcctgaaattacataccatttttataccctgtcttagtcactgttctattgctgtgaagagacaccatgaccaaggcaactcttataagagaaagcatttaataggggggctagattgtagtttcagaggtttagtctattatcatcatggcaaggaacatggaggcatgcagcaaaagtagttaagagctacatcctgatggcaggggttggataggggcaactgaaccaggtgtaggcttttgaaacatcaaaggctacccctccagtgacacccttctttgagcaagaccacacccactctagtaagtccacaccttctcatcctttcacatggctccattgctttgtgactaagcattcacatatatgagctgatagaggtcattcttaattcaaaccacaacagcatttagattatgcaatttagagtagtcttttttctagatttatttattttgagactgagtctggtctctctatgtagctctggttgacctgtaagttagatacctgcttctgccttctgagtgctagaactaagtcatgtgccaccatgcctatctagattatagattcttaggatcctgaattggaaatatcttttgtaatcttttaaaagatgtgcgtgagccgggcgtggtggcgcacgcctttaatcccagcactcgggaggcagaggcaggcggatttctgagtttgaggccagcttggtctacaaaatgagttccaggacagccagggctatacagagaaaccctgtctcaaaaacaaaaaaacaaaaaacaaacaaaaaagattaaaaaaaaagatgtgtgtgagtgcttgagtcctcttctggtatggaagtagagctcagagggcaacttataggaattggttttctccttctaacgtgcttctgaggttgattgaactaatgtcaccaggcttgactgcaagtgcctatactctccctaacccttttttgtagtctttagctctcagtcccttttgtaaaaggtccaagaaaatgttggtattcttccttctttgttttgtttgacagttggggactgaaccaaggttctcatgccttctgtgccatgtgcattactactgagcccagaaatgttgattttcctggaaggatttggagaggaagtttagatcgcagctgaattgcaaagttgaacaaaaagccccagtgacttaatttagtcaacatgtaattttatatgctgtctaggcattgtgatacctacctaacaggcctctgcccttctgatgttttatacatttttttgtagagtacatacagttagtaagaactgagggaaaaaccattaggccttctaaactgcacaaatgatggcttctaaggaaacatgagaaactaactttggcaaaggaaagttgaatgaggcttgggaagataatgagaaaggctgagggagcaagggctgaggacaatactgttttggcaggcagaaactaaattctgtctagacaccaaaaagttaaaacttgagatcatagataagttaacttggaaaggaacatatacaggatgatgatgatgagagagtgacattagttttgtgccttagaattattttttgcattgtgtagaagagacgagggtggtggtggtggagctgagtattggagatgagatatgtagtttgacagatcatatagtgccttttattagaatacacctgaaggtggcactgtttattctgtgggcagatactgggaacaaaggagtcagttctgtttgaggtcttagaacattgagagtttttgtttgtttgtttgtttgtttgttttatttttgagttaaggttttactatattgcccagactggatctagcttttgagttcaggttagcttcttgcatctgtttcccaagtagctggattgcagatgtgttcctgtgtctagcttgagaaggtggaatacacaggcctgatactcagaatggatatatagtgagacctacatgtgcaagttgatgatatgcagatgatactttgtcagcaaggattaatgtcagcaaaggttaaagagagtacaaatcaggtggcttcccagagagtttaaggctaggcctttaagagtctgcaaggattggtggtttggcaaaagagcctgtgagaggatcaggagaatcaattgttccattccctcaagatgtgagtgtaagtattgttttatgaattaaaaaaaattaacttatgtgtatgtgtgtgtgttttcatgattgttatagtgcctatagaggcccaaaaagggtattgggtctcttggagctggagtttcaggtgattctgagctgtcagatacagatgttggaacccaaactttagtcctttggaaaaacagcacagtaattcttaaacatagctaagctgtttctccaacccataatataaggatatttaaaagagggagttttcaatttttttttctatctcatttttcaggcaaaactcacaactctacttgtagtcctgtgagagcccgagagagtgagtagatttcagacttgaaagtagatcttggatttagcaacctggagggcagaggcatgagcagaaatcacatcaggtaggagttgagaagctggaaggggtgaagaaatgggtgaggggaatgcagacacttgaataggttggccacagggagcattgtgagtgtgtgtgtactcatatcttttaaatgaaagacattaacttaggaaatttcacatatttaggaaatttagctgtgttgggaagagaagtaaagtaagtaagtacctgaaaaatggagaggaattagaggagctggagatgcaggattgagtgtagatttgttaccatatacctcttcttggcaaaggttggagtctatgggttggagataggatgttttggaatcagaagagaatgggaaggtctgagtagtttgttggcagtgttatgcttctgagtgagtagatgatcattggatttatttggggttgtggttttgccatcttagtgtaaagaaaatcataagcaagattaaggaactctgcaaggctattatgtcacagtctaaattggttgcaggatgaagtaagtaaagaggttgtttggactatattgaattacagagccattgtatctacagccactttaaagaatcaaaccaaacaagacaccaggcagagcagcattgagagaacatttggaaactgaaaaatggatatggggctttagctaaaagagtgaaatgaagtcagacatggtggtgcatgtctttaattttagcacttggaggcacaggcaggcagatctctctgagtttgaggccagtctagtctatctaagttctaggacagagattctgtctttaaatacacacacacacacacacacacacacacacacacacacacacacacacacacacacaccaagggcgagggggagaaggagggagagagaattaaatataaatctaaaaaaaactccaaaacttaaaaaaaaaatctaggaagattatcaagattatccctaccctactccccatttgccattcacannnnnnnnnnnnnnnnnnnnnnnnnnnnnnnnnnnnnnnnnnnnnnnnnnnnnnnnnnnnnnnnnnnnnnnnnnnnnnnnnnnnnnnnnnnnnnnnnnnnnnnnnnnnnnnnnnnnnnnnnnnnnnnnnnnnnnnnnnnnnnnnnnnnnnnnnnnnnnnnnnnnnnnnnnnnnnnnnnnnnnnnnnnnnnnnnnnnnnnnnnnnnnnnnnnnnnnnnnnnnnnnnnnnnnnnnnnnnnnnnnnnnnnnnnnnnnnnnnnnnnnnnnnnnnnnnnnnnnnnnnnnnnnnnnnnnnnnnnnnnnnnnnnnnnnnnnnnnnnnnnnnnnnnnnnnnnnnnnnnnnnnnnnnnnnnnnnnnnnnnnnnnnnnnnnnnnnnnnnnnnnnnnnnnnnnnnnnnnnnnnnnnnnnnnnnnnnnnnnnnnnnnnnnnnnnnnnnnnnnnnnnnnnnnnnnnnnnnnnnnnnnnnnnnnnnnnnnnnnnnnnnnnnnnnnnnnnnnnnnnnnnnnnnnnnnnnnnnnnnnnnnnnnnnnnnnnnnnnnnnnnnnnnnnnnnnnnnnnnnnnnnnnnnnnnnnnnnnnnnnnnnnnnnnnnnnnnnnnnnnnnnnnnnnnnnnnnnnnnnnnnnnnnnnnnnnnnnnnnnnnatgggatctcatgccctcttctggtgagtctgtagacagctacagtgtactcatttatatacatacatacatatatatatatatgtgtgtgtgtgtgtgtgtgtgtatatataataatatatataatatatatatatatatataatatatatatatatatatatatataaaatcttaaaaaaaagaatctggacaataactgatgagatggaatgtgcaagacagggtctcatgtgacctagtctgctcttcaaattgctatgtaggtgaggctgtccttcaattcttgatcctcctacctccacctcctaagagctaggattccatatgtgacccttattagatatttagaaggaaaggaatccagttacttgtacaggagtgttgttcatgtgctcttgcaggtattgtgagagtagttaagtggaagagtctggcctacagaagggaaaagtgtttgggagacaggtgaaacttagggtctaggtgacttctctaggaaagagctttatttatctaatgaagatagaaaaggctacatggaggtgaatttggatttacagggagaaagtttgtagtcactagtacaactgggaacctcagtcacccaacccataaaatgcaattaagagggttgtggtaaagatggaatgcaatggtagatgttactctactcactgctgtggtagacatttgacaaaagcagctcaagggaagaaggatttattttggcccatggtttcagagtgtctcagtccatcatggcaggtatggtggccaaagtagaagagtgtgataggaaggagtcagggacccaaggacctgccttcaacgaaccactttttttttttcttttttttcttttggttttgatttttcgagacagggtttctctgtgtagccctggctgtcctggaactcactctgtagaccaggctggcctcgaactcagaaatcagcctgcctctgcctcctaagcgctgggattaaaggtgtgcgccaccacgcccagcaacaacccacttatagtgaattcctaaagcagtggttctcaacgttcctagtgctgaaaccctttaacacagttcttcattttgtagtgactcccaaccataaattatttttgttgctacttcataagagtacttttgctactattatgagttgtaatgtaagtatctgtgttttccagtggtcttaggtgtgccctgtgaaagagtcgtttgaccttcaagagagtttcacccataggttgagaatgcctgttcaaaaagtcctaaaatctcccaaaataggactacctgatggggacaatgcatttcaaacatgatcatgtgtgtgtgtgtgtgtgtgtgtgtgtgtgtgtgtgtgtgtgtgtgtgtgtgtgtcagatgtgaacctttaattaggcttgttgctcttagtaggagctcattgtgttagcacctcttagagtgaaagtatagtctctaaacctgtgtagcattgaaggttttgttaaagattacagcagagcaaaggaatatgagggaagtgtttactaggcttttctctgaagacaggcacatgaagcaaaggttacaacctaaaataatttcttcttagtgattataccttccctttaatcagattagctgtcaacagggtatttgaagtgtcttgggagtcccacatttatctggtactattaaaattatactttaccaagaaattgtagggctggtgagatggttcagtgggtaagaacactgactactcttccaaaggtactgagttcaaatcccagcaaccacatggtggctcacaaccacccataatgagatctgatgccctcttctggtgcgtttgaagacagctacagtgaacttataataataaataaatctttgggccggagcaagtggggttggccagagcaagcagaggtcctaagttcaattcccaacaatcacatgaaggctcacaaccatctgtacaactacagtgtatactcatatacataaaataaataaatcttaaaaaaaattttagtaagtacatttttaatgttgcaaagtagatgcaaattcatttgtaattgtgaagtgaaactacattgttttattaaacatgaatatagttttttaaagaagagttttgtaatttttgggtgagtatattcagtgtttttttttttttaaatataggtacaggtagaggcagtatagtctctaatactgtccttccttctgatgctagttgcaagtaaagttcttatgtatcaggcttatagtttatttatcacagaaagtgttcatattaatattagcgatggacacataggacagagttcaggaaagttccagatatgaaacttgtagttgtcctttccttggagaaacacagatggtatgacttcctgttggtatctatgtttaatagcttttgtgggaatttttattgaagctctgtagctaattgcctgcatagttatcttagtttctagccctctggagtttgatctatgcaattcaaatgttctacaaagtcatatcgttccactttgtggtatggtttagattcctccaggtgaacaaaaagagccttcctaggcaagattttagagcctacctactagaatccatggctaaaagctagagcttccttcggataaggtaaaaaatatattttgttttcattcagtctagacttactagctactgagttacaataaaaataggttaaaaaaaaaacccttataaataagtaattaaaacttggtgttatagtcacttagtacttagatagttaaggaaaatttaccaagaaattatattacttacatttttaatatagcaaaattgatgcaaattcatttataattttggaatgaaaatagattctgttaatttggacattactaccaccaccaccaccaccactactgttttgctttttgttttagggagacagggtttctctgtgttaaagaacaaccttggctgtcctggacttgctttgaagaccaggctgtcctcaaacttgcagagatccacctgcctctgcctcctgagtgctgtgtgtcaccatgcccagccctgaatgcaaatttttttcaagagagttttgtataagtctcagagggtttggaaagctggctaagtgatgaataagactggttactcttgcaggggacccaggttttatttctaacacttaatggcagaattccaaatccaagggaaacttataccctcttttggcttctgcaggaaccagatatgcctggagtttacatatatacatacatgcaggctaaatgttcatacacaaagaataaaaaagtaaaattaaaaggaaagtgtctaagcttgtcaaataatctttccgccctagacaatggtgtttttgaagccctaagctttttgtcctttcttccccttcacgaaaacatgtttgaatccaggtgagtaagagactgtcctggttagtgtttggtcaccttgacactagctacagttatttgggaagagggaactttgattgagaaaatgctagatcagattggcccgagtgtaaagcctgtgtggcctttttattttttatttttttaaacggacccagctcactgtgggcagtgccaaccctgggcaaggtgatcctgaattttataaggaagtcagttgaatcagtttcctccatggtttctgcttcacttctgcctcaggttcttactcagacttctcttggtgatggaggtaacctgagagttgtaagctgaagtaataacctcctttcttcgcctggtcgcttttgtcatggtgtattatcacaggagcagatagaagcccgaagacagagacattacagggacagtattagatttaagctttaaaagagacatcattttcatgcagactgagctcctggcatctccttcagctgtctcttgcgtatcactgttgcagagagtatatattcttaccccatagctctcatttcctggtttatgtccattacagaatagctcaagcccaggttaaaaacagcttaatgtgatgatgcttagtccagtggcaccactagatgtgtgtttgcatcaagtcttttagggtcctttatggaaatgcttccttgtagggaatttcctgacttcacactttctagaggtggctttttggggggaatggggttgctctatgtaatgctcataggagctgtaccaaagactatccaaaagatgctgtctcctgtctgtggcagatgtatgagggctaaagagttgagtcagctgaggtgaatggccttctggatttatactttttctgggtttcgaatataagtaaataaaatgattggtaactgtattcacactcgcgatctatatgttacagttaaatttaaattcttatggattcactttttttttggattgccacttaaagagtctttgtcctccaaggcagagtggctttccattgggatttttgcttcagtatttgaacttacagtggccatagttaatgaaaaagcactgaacccatgagtgagatttgcttcatgtttgaacaaatgttttaacccactgtcttcactaatactgtaactgctgtcttacagattgacttgatgcaaaacaccacaaaggctccatattacacagtatgcgatttttgaggtatgagctttagaaacttactacctctcatgtggcatgtacatcagctgtaacttcagttggatcattttgggggaaatttatgcatttcttcttttttcctcttcacatttttagagtattaaagggactgtggaaatatttttggatccttgtgaggattcttagtctaacataattttctttctccacaaaattgaaacactgattctggtagatagcttttttagctcttctaactagcttgcttagcactgattcctacctcatggagttgaaatctatattttctgttttgtgctttgctaaatcctaagtgcttatttctgttcttaacagttattttttagactgtggttgtcttgtcttgttggtgctaccagctaatactttctgagacataagcagaatagatactgtaaaagttgctgttttataagaatgctcagccattttgtattttgtgcattttgtgtcagaatacatgtgctcagtgcaagttggaaatgcacatttgcattagaagagcctgaccaggagggcatttggggctgttctcatagagtggctctggcctagggagttcttgttattgttaaattttttactttatgatgaaaaaaacttatgttcataacttttgggagtcaaaaacctttgtttctaatgaattgggaaatcattcttggttttgtaagcatactgtgaaatcacatgaatctaataagttaaaatcttttggtagcaatacagtgcttaatttcttcattgaagagcataggctgctttacatgtatgtaagaactttgtattgcatttacatgctcaaggactgctaatacatgcttttagcttggaaaactcgagtttattttgaattatggccataattcctactgtgtgccctgcaagctatgtatttgttaataattctgaatatgagctttgtaacagccttgcatgttagataggtattaattcacattttatacaagagaaaacaaaggcctggaaaacaacaagggaccatgctgttaaaatgctaggactggagacttagcccagatgtttttaacttgcccaatctacagtcttatgttactgctttttccacagaaagccctagttaggatagtatgggccacatgtgcgcatactgagaataggaaatgccgcatatataaacattgataaacaagttttgtatatcagaattagtcatgtccttatctgattgtgcatttagtaagttattatttttttgtcagattgaagtaggtgaaacctcattcttagaccctctcctcccctccccacaatcctgccaggaagcccataagctctccctttttttccagtattttttgagaaagtaacaatgtattagttgattataggcaaaaatttaatatactgtttttagagatatgaaggattatttttcaattgtttaatacatctttatgctccactgagcattcttagtggctgacttactgcctgcaataaagtatctccaatccccccgcgctccccgccatttcttggacgattttatttctctgcaatcaaagaattagctttgtttgtatgggcacagactctttgtacttggacgtaaggataaggacagtctatccatagcagttttagcttgctgtgttgtgttgcttactcagattttctagttaggagttcaagtttaattggccctgttctgtgatctgtatcagcaggaattgcagtaagtacagaccaaggagtccagcttgtggggttaagaacaggatgataaagtaaaaaagaagcatgtatgcaaactcctgctgcctcatgagttcagggttttggtttgtttgttctgtggtactgggtattaagccgagaacctcaccttgtttatagtagccaaggagctctaaactgccctttaccctcccactcgccaatcatcagagtttttaaagatttatttatttttatgtgcattgatgttttacctgcacatatgtatgtgagggtgcccaacactctagaagtggagttacagatagatggttgggagctgttgtgagtgctgggaattgaacctcagttctctggaatagcagccaatgtggtttggttttggttttggttgttatttgtttttaaaagattttatttattttatgtatgtgagtacactgtagctgtctgcagacacaccagaagaaggcattggatcccattacagatggttgtgagctgctatgtggttgttgggaattgaattcaggacctcagtgctctttaccgatgagccatctctccagcccataattttttttccttttttggggggtggggaaggtagatttcagggtttttctgtggacccctgggtgtcatagaactcactttatagaccaggctggccttgaacccagagatctgactgcctcttgagccttgtgattaaaggcattcaccaccacctcagactttggggaccacatgttagaaggagagaattgactgccacaagttgtcattttaaacttttatatgtttgctgtggcacttgtgggcacatgtatatacccaccactgagggttacactcacattaagtaagcaaatgtaataaaaaatcacatcagatttttatgaggcaaggtgtcactggttggctttggggccgaactttgtgatcttgcttttatctgagtagttaagattgtaggttttatcaccagcccagaagtttttttttttttttttggtttttcgagacagggtttctctgtgtgtagccctggctgtcctggcactcactttgtagaccaagctggcctcgaactcagaaatccgcctgcctctgcctcccgagtgctgggattaaaggcatgcgccaccacacccggcttcagaagatatttgtaatagagaaattactgctattactactatttttttaaaggaatttctttttcttgggacagtcaaacaagcaactacttatttgtattcttatgctaaaatagaatatttggttttcttctgtcttgacaatttatgagtgatacctagaagaataagacttacgaaattcttgtaggttgccttggttctttatttcacttacgaggaaattgagacatagaactaataggagctaataggtggataaagatgttgagttttgtcttgggctacaccactagttaattcctaagtgtcaggcattattctgacagtaattacattactgattccagtcctcagagtcagaatgtctggaattctgagaccttgccttctcttagcattttgtttgctgggctggcaagatgtgtgtaagtgctcttgttgtcaagcctgatgacctcagttcagactttggggaccacatgttggaaggagaaaattgactgccacaaattgtcatttttaacttttatatgcttgcggtggcacttgtgggcatatgtatatacccactactgatcttacactcacaataagtaattaaatgtaataaaatttttttattttattttaatttttttttggtttttcgagacagggtttctctgtgtagccctggcgtcctggaactcactttgtagaccaggctggccttgaactcagaaatccgtctgcctctgcctccccagtgctgggattaaaggcatgtgccaccacgccctgctaaaatttttatttcttacttttcaaataagtttagttggcattctttttggcaaaggcattgaaatatagctgagcataaacaaaatctttcttttagttagtgttcttatagcctacttgtttttcaaataccagtgcatattttcctgctagataattgaagattccattgagagcttggtagatattgctacaggcactaactttacaagaagtttggaacacactttgacatgctgacactattttttatttataaccaggaagactgaccactaaaccttttctggaaggattgtgtaggaagaattactttttagaatcacatcatgggagcgaatcctttagctagagtgaccagttgtttagtttttctgggacaggaagcatgcaaaacaagaaactccttgggctgaggaggtagctttctccataaaacaattgttgcatatgcacaaggacatgagttggattcctagcacacacataaaaagctgtatgtggtatgtatgtttgtaattacagctcaggggaagcagagagaggcagatttgtggagctccctagccagccagctccattattgtatctcaagtcccagcaggagactcccagggggaatcaaaggtctgaggggtaacacctgagcttggatcgaaacctgttcgtctctacacatatgcacctatggatatgcacatatacacattggcacctgcacacatctcccttctgtgaaaaaagcaaattaagtaaatgaacaaattaacatcagtataatccagcaggagagcatgagccacaggcagttcattgttgacagtctctttgctgaaaggcttactagacaatggagtgcttatatagagttatggctgagcataaagggtagaaggggagatgccatatagctttggctattgaaatatttgcttaaagctgtgatactaatattttctttttctttttcagaactgatagtgcatcagccgacccagatactttaaaatactcctcatctagagataggggtgtttcttcctcttatggactgcaaccttcaaattcagctgtggtgtctcggcaaaggcacgatgataccagaggccatgctgacatacagaatgacgaaaagggtatatagattttctcctgttggggcatgcttctgttttagacctgcttctcttttttttttaaccctccttccaggtaacatctgaggttcttccaggctactgtctcatttactcatccaaaatgtgcttaaagcatctgtctgaattgaactttatttctctactcatcttgcaatgaagggatcaaaatggtttggagtcaggtagcacaggggagatgagagaattaggttgtaaatgggtaagatcctgttagctgagggaatgaaacagggccctgttaatataatgtaaacattgctgttttcaggtggctacagtgtcaatggaggatctggggaaaatacttatggtcggaagtcgttggggcaagagctgaggattaacaatgtgaccagccctgagtttaccagtgttcagcatggcagtcgtgcattagccaccaaagacatgaggaaatcacagggtaagacttggagaccagggttgacacattacccctgatgtccatgagcagatgagtgcagctggcagccatttacattatatttctgtgaacttctagcttgtaagaaagggttacaagtctgggtaatatagtatttatttgcttgtttgagacagggtttctcttaacagctctggctgtcccagaactcacttcatagaccagactggcctagaattcagagatccacctacctctgcctcccaggtgctgggattaaagatgtacaccaccatgcccagcttctgaataggcagtggatatggtaagcggagtctttttaaaatttaaatatactcacaccttgccttcttttgcagatttttgagtataaataaataaagtgctttcaacattcagaatattaaagataatgtgtattcaagccaggcatagtggtacatccctttaatcccagcacttgaaaggcagagatcagtagatctctatgagttcaaggctagcatggtttgcatagtgaattccaggacagccagagctatataatagagacccccatctcaaaaacaaacaaacaaaaccaaacataatgcatatttctttcattaaagggaagtaaaattttattggtaaagcttcatacaaagttgaggggtatgtgtgtgtgtgtgtgtgtgtgtgtgtgtgtgtgtgtgtgtgtgtgtgtgtgtatatatatatatggtttgttttatacagttgctttttgcacagcgtagtttgttttatgtgtaccttgttgaacattttgtgtgggtacaaatataccacctttaagaaatgcatttaactttaaaacaaacaaacaaacaaacaaacaaacaaacaaacaaacaactgatttcttgggctagggagatggctcagtgcttaggtacagtttttattcttatacccgggtttgattcccaatacccttctgtccaaactagagaagtgataatgtgaacaagctgtttcctgcagaggcatctcttgagaaatagaaacatggtcttttctgcctatagagatatgtctctggcttagagtcattgcctatttttgttttgttttcctctcccttgttttttaaattttttttccttttttttttggttcttgttttttgttttttcttgagatgacttctctgtttttccttaatctcaaaacttatgagctcagaatagttggtagggtttgtgactgcagttaactgacaccatacccccttttacctgggtcttgaaaatagcttgaaatggaactgaaaaaaatgacttcctaagctttgtttttttttctttctttcattcatgtcatctttgacaagagtttttgggggtctgtggaactgtaaacaggcattctcctgtagatacaaagagccgaacaaaggagagaccagtataccctggttttgatgcactttagaacacctgatgtacacttcatatttttagtgtactaagtggctacaaaatatttatattcacagagcgatcgatgtcgtactctgatgagtctcgactgtcgaatcttcttcggaggatcacccgggaagatgacagagaccgaagactggctactgtaaagcagctgaaggagtttattcagcagccagaaaataaactggtgagtaaagtgcttggagttgctgagggttgtcagggttttcaaagcacacacgtggttctgtgttaggattgcagggcttgatttgcttccaggaagaaaatgaagggcttccttaccttgcatctggcctatgttaaggtgccttgaatgataggcccctaatgtgttgtttatctgtgatggctattgttggagtcactctggtgtctttcataaagtgcattaaatactttttaaaacatagtttaagttgtggataatagccctgcttgcaaccatctgtaatgggatctgatgcccttttttaatgtgtctgaagagagcgacagtgaactcacacataaaatacaacataaaatacaacagtgtactcacacataaactacaacataaaatacaacagtgtgctcacacataaaatacaacataaaatacaacagtgaactcacacataaaatacaacataaaatacaacagtgaactcacacataaaatacaacataaaatacaacagtgaactcacacataaaatacaacataaaatacaacagtgtgctcacacataaaatacaacataaaatacaacagtgtgctcacacataaaatacaacataaaatacaacagtgaactcacacataaaatacaacataaaatacaacagtgtgctcacacataaaatacaacagtgaactcacacataaaatacaacataaaatacaacagtgtgctcacacataaaatacaacataaaatacaacagtgtgctcacacataaaatacaacagtgaactcacacataaaatacaacataaaatacaacagtgtactcacacataaaatacaacagtgtgctcacacataaaatacaacataaaatacaacagtgagctcacacataaaatacaacataaaatacaacagtgtgctcacacataaaatacaacataaaatacaacagtgtgctcacacataaaatacaacataaaatacaacagtgtgctcacacataaaataattcctaaagaaagaagggggaagctgggcatctcaggttaaggatgtctcttgcaaaggtcttgagtttggtttccagcattcgtgttgggcacctcacaattgcctgtaactccagctccaggtgattggacacctttggcctccaagaacgcttcttcatgaatgcacatacactttgaaataataatgggaagaagtggaaaagcccttaagacaaacttcaaaagcagttagaaaatattcactcttaaataattttcctgatgttaagaacttgatagagaaaattacaaagacttaatacagtaaggcgcctcccctcaaatttcattattaaaagtttgattaaagagcaagtagaaagatgcgcagtgaagctcttgctgtcagccctagaatctgtcatcgctatgtcactgtattcctttattacgtctctcaatccccttgccattccatgtaaatgctctccagaggctgccagttaaaatgagcttggatgtatctcgaaactgattatgactcttatttcctgtgagtcagtttctttcatatcccgaagagggaaacatgccatcctcatgtgattgaggaatctatgtgaaagagagtcttctttcctaaacattggcttctggaaaggcatgagctgatgcgctatgaatgaaagttactattccagagagttttatacatgtaaactgagatgctgcataatctacgaatggaaagataagttaaagaatgtatacagtgctgtttttaagtagaatctgaagtttctctctatattttttaaggtactagttaaacagttggataatatcttggctgctgttcatgatgtgctcaatgaaaggtaagtaataatggtcacatttagatgattttgaaggtaattataaaaataaagtaaacatgataaactgtggaccgtatcactaagacttctaaacttgttatgtaagttaataattattgaatacaaatggagtctactcgaaagaggctcttgtctcctagacactggcttgtggaaagacatgagctgatgctttcatgaatgaaagctactgttgcagagagtttttaaaaatgcttagagagcaatgggaaaggggaactttattcttaaaataatctctaggcattgcataggtgtgcaatgattccaaagatttgcagtactgaaatacactcagggccgggcgtagtgctgcacgcctttaatcccagcactcgagaggcagaggcaggcggatttctgagttggaggccagcctggtctacaaagtgagttccaggacagccagggctacagagaaaccctgtctcgaaaaacaaaacaaaacaaaaaaacaaaaaacaaaaaaaaacaacagaaaaaaagaaatacactcagtgtagcagatcactgttttagtttacataattacttaatgctacacttaattgtaagtttgtgtggtttagctactaaaaaatttcctacattggagtccttacttggtgggtattatagagaaatggagtacattttctaaaaactccctcatgcctctttctgtgaatcagttataacccaagcctggatattagcacttctcagctttttaatattttttagtaaatgatttcctaaagaaatctcatgtctgataaagggacttttgagcattgtagaactcaggaggatacagatgtagaatgggtaaaattccacctttttatttagtttgagctttggaaagttatttaggaattctttaatacatgggagacagtcttttgtaagatgtatcatactttcatccttgaaaattgatgccttttgtatgttttttgttccatttgcattaaaacaaacacagtagtaagttgcttcaggagttgaggcaagagggagcttgctgtctgggccttctctgtgcttctctgagctacgaggctgagaagatcttcaagtggattttcagcaagtttagctcatctgcgaaagatgaggtgaagctcctctacttgtgtgccacttacagagcgctggagactgtgggggagaagaaagccttttcttcggtgatgcaggtgagagccagggacccacaatgcagtgcagtgaggtaaagggcaggcctagctgcctcctgttgagggcagcactgtgaaaatgaatgccttttaagtccaagtaaagttagggttaaagtaactgaattttagacatttatgtctttttagtttttagaagcttccctttgaagttgcttaatactagagtgacttgcagatttgaaagtaggaactctactgtgagagttcagtcagaggccgtcagcgtttgagagagactaacgctaaacatcacagctaatttctaaatctttttcccccccctcccctttaaaattccctaaatttagatttgatgtcaaaaattataaatctaaatactgcaaatacttctgaatatctggatatatagaaaagctcattcccaacgtaggtttttttctttcttttttgaatataagatgtcactgtctgcgccactgttctctaatgttttacctttctgccttggccctgagagccaaggctctatgctggatctgagaaatatttatataacatttttgttgagggaatgtttgaaaaaaataagttattttgtacctggaatagctgatgtctatttatttatttatttgtttagaggcagagtcttactatgtattctgcttagctcaaaaccaaagagatcctcctgctgctgtcttttgagtgctgggactagagggttgtgatactatgcctagctttgtttgctttttacagctctcaaactgctttattttgagtaatttaaaaaatatatgtatgtgtgtttgtttgtgtgaatgtatcaaaaactgatatacatttttccttgattatagaaacttatgaaagtttataataattacttgtaactaaacaacatagtagcaaattggtctaattttacatatagtagtattttctaactgcagtttgaaagattccaaatccacaggaagatatgtagatcactctttgttttttttgtttgtttgtttgttttctgagacagggtttctttttactaagagagcttgctctagaacttgctctgtagattagtcaggcctctgcctctagtgtactaggattaaagagtgtcactctacctgccttaaatattctttaactcaggcttatcactttttttttttgtggtggggagtcaggtgttgctgaagattataattataccccaggcctcatgtatattaagaatagtactgtggaggcatttcgtcagcccccacttaatcacattttgctaaaagctgttttattggtttactttttgttttttaagtcagggtcttactctatatagcccaggctggcctggaactcatggtgatcctcctgtacctgcttcccaaatgctggagttacaaggaggtactaccatatctgttttttttctttatcttttttggtgttgaggtatgtgtggtattcacttgtttggaggacagaggtaggttttgttttttcttttgttctccaccttagttttttgagccagggtctctcactgcctggtccataaaccccagtgaccgcctgtctccagctcctcctcccatcatagtgcttgagttacagacatttgtcattacatctagccttgagtgggtgttagcaagcgagcccaggtcctcatgcttatatgactggcactttaccaacctagcttcctatcttccatcttcctatcacttacaattgattttcacatacacactttaccaacctagccatcttcctatcacttacaattgattttcacatacacattttttgaggaagtatttgaagataaatacataatgaaaattcaccctgttactattttagtacatatcaccgaagaacaagcctatcctcttctttatcagcagtattattcatctaaggaaaggtattttattttctatacactatgtgtccaaatttctataattgttcttaaggcaccatttatatttatggttcctctgacccaggaacccacttaagattcaagcattgcctttggtactgtgcttttaaaagcttccttataaaaatagttttacacgatcactttttgttttattgtatgccagcagccccnnnnnnnnnnnnnnnnnnnntgatgcattgcaggcaggttgtccctctgtgggacttgaagaatgatttcctgattaaggggatgatcatcagatcttattatgaagcttcagttttcctttcaaataagcagtctgggtctgatgtcttgatcttttgatgtcgtggtgttttggtaatgttacattcagtccagactgttcaacactggctactgcacaatggtgattttaaaattctagctttaccttttaaaaagattcatttataatatgtttatgagtgttacatatgcaatcatgtacttatgtggtgtctgtacagggtataaaaaggtatcagatcatcagatcccctggaattggagttacaaacatttgtgacctgttctgcatgtgttaagaactgaacttggatacagcagatgttttagctactgagccatctctctagcgctgcattatacctcttcattgcatgtatgtgtacacatgtgagcatgcacatgtacatacatgataggtctattgtcattatgttttcttagtagaaagaaaaatgaatgtcatctatggggtgctgtgctaattcacgctctccagatcattttaattagaaacaaaatgcatatactttgccttaaagcatattaattacctaacatttactctgaaaaaaattttccttttgttctttggtgttttaagaaaggttcttgaggctggagaaatggctcagtggttaagagcactgtctgttcttccggaggtcctgagttcaaatcccagcaaccacatggtggctcacaaccatctgtaatgtgatcggatgccctcttctggtgtgtctgaagacagccacagtgtacttacatataacaaataaataactctttttaaaaaaaaaaaaggaaaaaaagaaagaagggttttttcttagtagccccggcttttctaatctatttttccccagcctcccaggtactgtgccacatctcctagctttacactacatgcttaattctagagcagctgaaatgttttaaagaaattagattcaagtacatcttacttttttaggggtgtggtgatttaattatgtgtccctgtctggtatggagctttctgtgtagacaagaatagtcttaaactgtcaagagttcatgtgccaccatgtctagttatatcttacttttatactttaaattcagtcatagccatagttccttatgaataacatatagagttgtttagcactaaagttagttgataggataggaatagtgttaaaggccattataatagagaacagtgttggttttcagcctaatacaatgaatgaacttttacttaaaaaaattaaagcaatagaattttattttaaaatactaagcttgaagtatttagataaaagtggtggaattttacactctctagttttatgttttattggcatcataagttgtgaagaaatctttttattttctttctactttgtcaaatgtttatgatcttaactttgtttttcagcttgtgatgaccagcctacaatccatccttgaaaatgtggatacaccagaattactttgcaaatgtgttaagtgcattcttttggtggctcgttgctaccctcatattttcagcactaattttagggtgagtttctcatactctggtgttatggttgtgtaaagtgggacatccaatggaaaacaagctcctgatccttcaaatatatgatcagtgatgttttgggggcaaaggagttgattggtctgctctcctaacagtggtgatgatgatgacacatgatggttatgttacttttataagacataactgcagttctctttctgacattaatactttcgctatagaagggaatatttccctcagcgtcatgactaacaattcttttattttgtctctgtagctcacaggtaaatcgaacagctttttctagggtcttttaatgtgatgtgatctcactgatgaaatagcagtgagaccttaaaatgactggcctcctgtcttttttttttttcctccatcaaggatacagttgatatattagttggatggcacatagatcatactcagaaaccctccctcacacagcaggtgtctggtaagtgttttagcttgtgttcttgtacatactgtgaaaagaagagttgatctgatctagaaaaaagggttgctttaagaaggtatattagctcataatgttgttccacctatagggatgcagatcccttcagctccttgggtactttctctagctcctgcattgggggccctgtgatccatccaatagctgactgtgagcatccacttctgtgtttgctaggccccggcattgtctcacaagagacagctatatctgggtcctttcagcaaaatcttgctagtgtatgcaatggtgtcagcgtttggaagctgattatgggatggatccctggatatggcagtctttagatggtccatcctttcgtcacagctccaaactttatctctgtaactctttccatgtgtgttttgttcccaattctaagaaggggcacagtgtccacactttggtcttcgttcttcttgagtttcatgtgtttaacaaattgtatcttatatcttgggtatgctaagtttttgggctaatatccacttatcagcgagtacatattgtgtgagttcctttgtgattgtgttacctcactcaggatgatgccctccaggtccatccatttgcctaggaatttcataaattcattctttttaacagctgagtagtactccattatgaactaaccagtaccccggagctcttgactctagctgcatatgtatcaaaagatggtctagtcggccatcactggaaagagaggcccattggacttgcaaactttatatgccccagtacaggggaacgccagggccaaaaagtggaagtgggtgggtaggggagttgggggggtagtgtattggggactttttggatagcattggaaatgtaaatgaggaaaatacctaattaaaaaaaattaattctaaaaaaaaaagaaggtatattagctattagattttatatatatatatatatatatatatatctcacttgatagctcttgatcttttcaaagcatacttatgcaataaatactagttaggaaaaaatacagatcacagtatagtgcctgtgagaatttaaatactgtatctcaggtcatctgtagtatgtatagcaagataaagtcaagagattggaatactctgaaaattagaatagaagattctggtcataggttgttttaattgttgcttttctggtcattttaaataaaccacaaatatttggaagattgtcataaataatagagaacaaatgataactgagctaatctgtacacacctgcatattccacttggcacagtttctccccctctctgcgtatttggtgtaactttggaaaagagtatatgccagtgagagtagatggtgtcattcctgctgtgaagctaaatacacatctttgacaactagttctgaccctggaatagaaagctaggttgatagtacatggtggcacttacacaaacacacacacacacacacacacacacacacacacacacacacacacacacacagtagatattaaaatagctaaaaaaaatcacgcaagattacatgctgatttctgaaggttgttaatttctgttatattaaaagaggcttgattaattactagcatgcttttaatgggagtcctactattatgatacagatcatgctttaataatcaagtatcttgatcatttttaattttggtatctcccccccaccccccttttttttaaacctcaaaatttcttctccgatgtcaagggtggttgcagagtttggagccattttgggtagctgaccttgcattttctaccactcttcttggtcaatttttagaagacatggaggcatatgctgaggtaagttgtagaaagccaattctaagtgattcttaaagtgttataataaagagccaggcagtggtggcgcacgcctgtaatcccagcactcaggaggcagaggcaggcagatttctgagttcaaggccagcctggtctacagagtgagttccaagacagctaggactacacagagaaaccctgtctcaagggggctggggggggggggagtgttataaagaaaattcaaagattttaaacagaagtagatttattttaaaaataattaagactgacctttaactagaacttacaagatcattgaggttagattttattttatttatttatttttggtattttcaagttagagaaaaaaatgtttctaggttgatatgtaaagtttgaatattcttaatagcagatgtttttcttgaaggcaaatcccatagttgctacttggtttctgttggttgttgttaccaacagcagatgctatccagaaataaaaactggccctaaagatgctactctaggttattcagagactgtcatatcatgctgtccagggcaaaattgggtttactgcactggagcctgtgcaattactgtctgtgactgtgacagcgttcagggttcttcctataacctttgcccttgctctggccttactgctgtggcttaagcctttgttgtctcctgtgggggtaccataatttctttttggtgttaaaagctgtctgaaatactaagtttgctttagttctttgctgcttctaattaaggttcattattctaccacttttatcactggagtgtttgctcttttcagggagaataaatataatattatactttgattccttgggacatacaggatgcaggtcatctcatctctctatctcacccccctactcacctatacagatgattattagtctttgaaaaggtacctgttcttacaagtttagacacttaggttgttttaatatccctcctccttccctccttccctccctctgtattcgtttgttttcttcctctccctctcctctcttttcttccttccttccttccttccttccttccttccttccttccttcnnnnnnnnnnnnnnnnnnnnctcccctcctcccctcctctcctcctctcctcctctcctcctcttctccttttctcttctctctgtgcataaccttatctggttatgtagaccagtatggtcttgaactcacagagatcccgctgcctcccatatattgaattaaaggtgtgtgccactctgactcctttccatttttattttatatgtaattatctgtagaaatatgttgattctaacacccagttttaatcattctctctgggtatattttatacttccaactagattataagtttatagagtagttccttaaatttctaacctcattcctttggagtacatgctattaatatattcttaatattttggtcaaagattatatagaatgagaatttagtagacaacagttgtaggaatggcaaaactttactccatttgtacttaaacagtaatatatgcataaaggtttggtctttttccaactcctctgcatcggtcgagatcattttcataattttatctggttctgtaaggaatgatttagagaactttaggcatatgcaatttggtatttcctcttttaggctaaaatttctctcaattggtaacagtctttctagggcttggtgtggttgaacatatctttaatcccagcacttgggaggcggaattgggtgaatctctgtgtgttggaattcagcctggtctccatattgatttttcaggacagtaagggctacttacactgttttaaaagggggaaaacaaacaaacaaacaaacctgccagcattaactgactaaagaattgagatacttacaggataagtctcagctatccagaggctgagattaagagactcaattgagcccataagtcttggcaacatagtaagactcttatctccaaatgaataaagtgttaagggtatctgggaatagattataaagaaatagggatgggagtaaagtttactgttgagtgcttacctagtatatgcaagaggttgtgcttgattcctgattgatttccagtatatagcaatgaagccacagcaaatcttatactacttcagtaagaatgttgtgtattcacatctaggacctcagccatgtggcctctggggagtcagtggatgaagatgttcctcctccatcagtgtcattaccaaagctggcagcacttctccgtgtgttcagtactgtggtgaggagcattggggaacgctttagcccaattcggggtccaccaattacagaggcatacgtaacagatgtaagtgtcttttaaaatccaggttgaattgtgagggcctcctgtacccagtgaactatattgagctttatttgcttaacatgttaagtgtgcttgtctctatctactctttactcagaaaagtagggaagcctgcttatcaaccaccatccttgaactctcacctcaccaagtgagggccatcttgatttcttacgtacccttgaaatttccttacggagttccttcatagatccatgtatttttattttttttttgttgtactgaggattgaacttagtaccttgcacaggctctatcctcacctgcacttcataaagcattgagatttttcctcaacctgtacttacttactattttaatatctacttttaaaactttaaaaaataatattaccttttctttaaaaactgattctccttgcttggcatggtggtgaatgcctttaatcccagcactatgaagatagaggtatgcagatctctgagttcgagaccagtttggttcacagagtgagttctaggacaacaagaactatgtggagaaaccctgtctcaaacaacaaacaaacaaataagttgaggatccttttagtttcaacacaataagaatcatatactataaaatgttagaagtcatactattgggttgaatgtgtagtttgtggttagagcttttgcctttcatggaagtcctgaatgtcatccccactactgcagtgaaaacaaactggtcattttctttgagcatgagggtgaaactcaggagtcatatgtttgtgtattttttgatgtaaagagacactttttaaaaaaaaaatatcaacctaaagccaggtatgagaagtgaccagaccacagcacttgagtgatcagtgtacagtgtagtctagcagagagaactgagccatgatcactgctgtggagtgaggagggagatgtgttagtggcagccagggaagacagtctacatgactgaaacatgctgctgttcacgcactttttaggagcctgactttggacacattgctagataaatattgtgtcatttttggtaagatggtgggtattagcagaagtatcagattatacatacatataactaagactgcatgttgataattcaggacttcagaatggtttagtttcttccctttttattacataaaaggatgttgcttcaagagtggtgttgaagtaaagaaagttaactcaaatgaaaaacaaaaggaaagaaacataagtcttctcagaatagttatattttgaatatgttatgaaggtcttcaatttaggcttttgtgaatagcattaaggaaacttctttacaggttttaaagacaactgggtattattgattgattgttaaagatctgtgatactttgtagcatggactttcccatttttcaaaaatctcatttactagaaatgtagtacacaaatactattaacagtttagtgatttatgtgtgttggaaattacttgtgtcttgtggtccttaatgggattgtgcatatttggagttcttattttgagaaagaacttccagggttcagttgtagaacacttggctatcatgatcactgatacacaaactttaatattagcttaaaagcaattttagtatttactttgaaaagattattaaaaatacaagatctgtgtttaagcaagtgtgagtaggacattcctaagtatgctacattgtgatgtatatcacagcgataaagatactgagctttttatccagccttggaataattacatgagtagaggaagtgtgtaattgaactcaagggcgacaaacttcatttcttgtcataataggagcttggaatacattttagccaagttttttcttttcttttcctttaaattgtattaaagatgcctatatcagctaccaagaattagggactcagctgtgaactgtggtggtgcacatctgtaaagacagcctggattatggattattctttttgcctcatctcagtccaaaaaacaaaaacaaaaaacaaaaaaaccccaagcccacaaaacctcaaacaagactattagttaacaagatatttttgagttgaaactgcattaggtagaaaatagtggtgtagagaagcctgtgagtgtttaaaaaggtgcttgttttccccatttgcaggttctatacagagtaatgagatgcgtgacggctgcaaaccaagtgtttttttctgaggctgtgttgacagctgctaatgagtgtgttggtgttttgctcggcagcttggatcctagcatgactatacattgtgacatggtcattacatatggattagaccaactggagaattgccagacttgtggtaccgattatatcatctcagtcttgaatttgctcacattggtatgtgaattactgtttttgttgtttttaaattgtttatgtctttaagttgatgtgagagaaagaaagagctttgcttcttgtgttttaagtaagggattgcattttaaagaatcctttgataattctcatttttctagtccagtatggtttttttcctagtatcaatttgcatttagtgtctggtagctcactttagtctaacttctctaactttgtatttatgacatgtccccattttcctgagactcagtagtgctcctgatatgtaccttatgggagaatgtatctatatttaaagacctgcttatatttgatttcttagaaaaaattcaaatgatttctctttaatttctctttactttattagctatatagcctctctctctgaaatctaatggaatagtgagtctttatactgagtactcagttcctgtaattagaaacacatggcctgtcttcttcactggaggccgctggttgtctcttgctagaacactgtccaattttagagttgtaaggtctccagatcccttgctctctccctagtttcccctttttaaagaattgccaactttaattgacacttttttcacttgcaatgtgcatctaaggttcttccttgcctctttgtaacttaagtaagcttattttaaaatttttgttcatttagattgttgagcagataaatacaaaacttccatcgtcctttgtagaaaagctttttataccatcatctaaactactatttctacgataccacaaagaaaaagaggtaagtaacacattgataacagcaagtggattctttttgacattgaacttttgctggttagtagactatgtcactgtgaaataatacttgatgctgaatataaactgattacaatgaatacttttggttaatacttattatcatacgaagtactgtcatgactgaaaaattcttataaaggcaaatcgagtgacaatcttggaattttggtttcttttaaaaaacatagaaacattataagaatgtactttcgttttaatcccaggtatggggctgcttcagattgtccatagcagctgactatgatttgtcttgtgctctagcagtggcatgattttgccagctccagatactttctgccatcgtgtaacatttggaattctggggacttttcataggatatataaatgctagggctctgagaggtgggttgggttgttggtttattgttggtggtcatgaacaaagaagaaatagtaagaagaaattagatatcctgactgcagatcaaacttgccctaaggaacctgacacctctaatgagcagaaaatagtcttaaggatgatgatgccctctttacgacacctgactttattcaggaatctctttcctttcctctctttttctcctcttttttttttttttttttttttaaagatttacttatttattatacgtgagtgtcttcagacacaccagacgagggcgtcaaatctcattacagatgggtgtgaaccaccatgtggttgctgggatttgaactcaggaccttcggaagagcagtcagtgctcttaaccactgactcatccatctctccagcccccccctttctcctcttttatctagtgttaggatatagttagtgaagacgagtggaagaaagaacccacagagttgctaaatccagcaacagatgaagagtcagatatatttctaagttcagaagtatcgcatatattaaaaataaaattactagttactaataagctggcacgccaaattgactatagatctcaatagatgggggagcttaagctgttgtttgtatatgtgttggcattgactttaaatcaagataagattcgtcaatgctccttgaaaatctcacattagcagcgtttgagagcattcattatttataataaattcatagagctttgttaaaaaaaaaaagtaacctacatacaggttccttaaaattggtcttctgaagtgaaccttttgggtgttacgtgtctaaatcttgaagggtcatctccccagcgtgctgcatgcatatagtgatttttaaccagttccctgaatttttcttttgtaggttgttgctgtagctcatgctgtttatcaagcagtgctcagcttgaagaatattcctgttctggagactgcctataaattaattttgggagaaatgacttgtgcactaaacaatctgctacacagtctccagcttcctgatgcctgttctgagattaaacatgaggcttttcagaatcatgtgttcaacattgacaatgccaactttgtagttatatttgatctcagtgcactgactacaattggaaatgccaaaaactcattaattggggtaagtcattaattttatagactttgttattatgttattatttatttatgtatttgttatttatgtattttgtattatttctggttttgagacagagttctgctctatggcccagatgggccttgagcttcctgtgttcttggctttagcattctgagtcctgggattactgacagataccaccattcctggccataaatctatccatgcatggttaacctctctctacccttccatacctcatttacttctttttcctcttctttgtaatagagttctttgtagactactaggcttaccctaggtgctgagattataggtacgcatcaccatgttcatttataacttcatatattttgtttgttggtggtagggtgggacagggacagagttcaacattcaataccttctttaattgctctccatcttattttttgagatagggtctctcattgaacctggagatcactgattgagctagcctgtttttgtcttgtgagtgctggcattacagatgtttgcctagtttatgtgggtgctggtgctggttgtcctttacccactgaaccatcttcttagcgtgggtatttgttttgttttgtttttctttttgaaagaagagtcacccttttctaacttcaaaaaaggacctggagagatgatggctcagctaatgagagcaagtaatgttctgttcttgcagaagacccaagtttggttcccagcaccctgtcaggctgctcacgacagcctgtaagtccagagtccaagtctagcacatgcactaactcatcttcctctgcgctcacccttcccccccaatgtaataataacaaatgggggaaaaatcagccagatgcagtatatgcctacaattgagtacctagaaggtgaaaacaggaggattacaggttccagcctgcctgtgtttagagaccagtctacacggtgagactctgtcaaaaaaaaaaaaaaaaaaaaaaaagaaaattctttacctcttcctgggggatatatagaattaatagttgctaaagagagagagtctttgtgtatgtatgcctctggtaatgatgtagcttatatttctctaaactatactactaaatttgttaaggctcaaaaccaaacaaccaaaaggacacacagttgaagtgaagagtgtgagaagaaaaggattagcgcaagggaataagagggtaatggaggaggggatatgtgatcagaatactttttgtgcgcgtatgaaaatgtcctaacgaagtcatcaacatacatgaaacatgcccagtgtataggtgggggagggagaaggctgggcatataactaagtggcagagtgcttgccttgaattcaatcccatcattacacacacacacacacacacacacacacacacacacacacacacacacacacacacacacaaggatacaagaaatttgatgtggcatcatttttgatatttctttttatttgaattagctctatagctctgactggtgaaaaaaagagatctgcccaccttttcctttgcttcccaagtattggaattatgctgtctgattttgattttaggattactgcacctagtttatatatttcttccttctattggaccatacagaggtgaaaacaattttagtagagagcaatgttctgtgttaaatgatagttttgtgagaaggaagaaaacttgatgcttgtgcctgctttctccagcctgtgtgctcagagtgcctgcactgtccatagatgctccttcctccctgctctttcacctcacctttgatagctgttggaaacgtcctttcttatacatctctgttttatttttgaggaattcatgtcttatatagattgggaaaggtttattctctccaatttgtcaatgaatgtagcagttagtcagatggagcattgtgtcctagaggaaaagagatgggcagaaaaggctcagggaggtgggattgctagctttgtcattgaacaagataccttgccatttgcaacaagctgatggttgaggaaatataggctctacggtatcaaaaagtacaaagggctttgcttaaactagacatcagctaactgatcctttgccccaaacttagttgtgtacctgcttcttatttgtgttttaaatagcttgattgagatatacttcacatagcatacaatcccttcttacattttactagtgtttactgacttgattacacagcgtggttgtgaacattaccatgctgtactcctttcgtaaagaaagcagtattagaagcagcttgttatggcattccttgttttggctgatgatgcctcatgacagtggaatagttgaggagttgctgggttaagcagagatgccacttggctgcaaaacctaacttgagaaactatttggtgaggactccagctttgtgtattagataatttccaagtttcaggccatcacttttaggttttcagtgtctaagcacacttgattccaaaaagtagactgttcatctatgcatgtgtatgtcttggagccataattatacttggtttttaccttggcagatgtgggcactgtctccaactgtatttgcactgctgagtaagaatctgatgattgtgcatagtgacctggctgttcacttccctgccattcagtatgcggtgctctacaccctgtattcccattgtaccaggtactgtgctcactgtcctcagaatttaaaaaaaaaaaaaaaagcaggaatgttttgtttcttgaccttgctgacttttttttgatgacagctgaaaagatggtctctgctttgcttttcaggcacgatcacttcatatccagtagtcttagctcttcatccccttccttatttgatggtgcggtgattagtactgtaactacagccacaaagaaacatttctcaattatattaaatcttttgggaatattgctaaagaaagataatcttaaccaggacacaaggtacctaagtaatttttaaaaataatatttaactcctaggtttattaatttattgtaatttgacgttaagaaatgtagtttatagtttcattgtgaagcatctgatttgattctgttacttgatttctgtgtatcctgcagggctgtactttggcgagcttttccagtggctgctgctttgcagacacaatatcatgatacagaaacagaattctttagactttgctttttatttacagactaagttacttgttaattttatatgttttgtgtatctctctgtgtgcaagtgagtgcagtgctcttggaggcttgcagtgttggattccctgtagctggagtagcagtgttgtgagctggcttatgtgggtgctggaaacttgaaagggcagtggccactgaacagcctgtccagatccactttttaaaaaaaaatttttttttattattattactacttttgttgtttgaaaaataaagagaaactgatagaagagagtgtcttgttgtttttgttttgttttaatgtaaagccaactttattttatgtttcaggaaattgttaatgacatgggctttggaagtggctgtattaatgaagaagtctgaaacatatgcacctttattctcccttccatcttttcataaattttccaaaggccttttagccaacagtaagagactaatgttttaattttgtttacctttaaaataatattggttagcagaaggctgttaggtcagcacttgaggatgtgaagatgcgtagtccctattgtagtgccgttcagagtagattatatttcattcttagtatttgaaaaataattgaattgccagattttcaatcttatatgttaagttatcccatgaagttgaaatcttttcttagaataaggtttacatgagggatggtcaacttgattttgttgagtactaatttcctaggtattactgtcagaaaggattccaggcaagggtagggcatagtccatagttggtgatgtctgtttgatgagtgagtgggtgaatgaatgaatgggttcaatagatacatacacttttgaatgtgtggtgtcactgaaagtaacttttcttttttaataatagctcttgttgaagatgtgaatatctgcttgcaagcatgtagcagtctccatgcgttgtcctcttctttgccagatgatctgctacaaaggtacggaggagagaccacatctttgactctgactatactgtacatgggaatactgccacatgtccttaatctgttatttttcataggtgtgttgatgtctgccgtgttcagcttgtccatagtggaactcgtattcgacaggcctttgggaagctgttgaagtcaattcctttagatgttgtactaaggtataactattttagctcattatattttaccactttgtaattgtttaccatagcaaaagagaaatcactatattactgtattaattttataggctacatggcacttagttatcaaagagatgtctgagaataattttggagacctagaagaagagaaatttttatgattttcatcatcttacaattggtggagaatagtttatgtagtaccaaaatgtatttcttagtagtttagattctcttcctccccccccccccccgacccctcctttggtttggttttacaagacaaggtttcatagattttttttttaattattattatttttaattatttatttttgttttgtgtctgaatgttttgcctgtgtgtacatctctgtaccaccacgtgcatgcctgctgtgtctactgagatcaggacaaacgtgttgaatcccttggaacttgaatcacaatttgttgttgtttctttttttcttttcttttcttttcttttttttttttttttaaagatttatttattttatatacatgagtacactgtagttgtcttcagacacaccagaaggcggcatcagatcccattatggatggttgtgagccaccttgtgtttgctgggaattgaactcaggacttctagaagagcagctagtgctcttaaccgctgagccatatctccagcccccatcatacgtttttgagctgccttgtgggtactagaaaccaaacccacctcctctgcagatcaagaagtacccttagtaactgagtcatctctaaccccattagttgaaatatttatttatttatttatttatttatttatttatttagcttttgattaagctcattttgggaacatttgtttcatttttgatgggtttcagttttcccagggtaacctctaacttcttgtgtagccaaggagaatcctaaactgcctactactactactactactactactactactactactactactacttcttcttcttcttcttcttcttcttttacttagtnnnnnnnnnnnnnnnnnnnnnnnnnnnnnnnnnnnnnnnnnnnnnnnnnnnnnnnnnnnnnnnnnnnnnnnnnnnnnnnnnnnnnnnnnnnnnnnnnnnnnnnnnnnnnnnnnnnnnnnnnnnnnnnnnnnnnnnnnnnnnnnnnnnnnnnnnnnnnnnnnnnnnnnnnnnnnnnnnnnnnnnnnnnnnnnnnnnnnnnnnnnnnnnnnnnnnnnnnnnnnnnnnnnnnnnnnnnnnnnnnnnnnnnnnnnnnnnnnnnnnnnnnnnnnnnnnnnnnnnnnnnnnnnnnnnnnnnnnnnnnnnnnnnnnnnnnnnnnnnnnnnnnnnnnnnnnnnnnnnnnnnnnnnnnnnnnnnnnnnnnnnnnnnnnnnnnnnnnnnnnnnnnnnnnnnnnnnnnnnnnnnnnnnnnnnnnnnnnnnnnnnnnnnnnnnnnnnnnnnnnnnnnnnnnnnnnnnnnnnnnnnnnnnnnnnnnnnnnnnnnnnnnnnnnnnnnnnnnnnnnnnnnnnnnnnnnnnnnnnnnnnnnnnnnnnnnnnnnnnnnnnnnnnnnnnnnnnnnnnnnnnnnnnnnnnnnnnnnnnnnnnnnnnnnnnnnnnnnnnnnnnnnnnnnnnnnnnnnnnnnnnnnnnnnnnnnnnnnnnnnnnnnnnnnnnnnnnnnnnnnnnnnnnnnnnnnnnnnnnnnnnnnnnnnnnnnnnnnnnnnnnnnnnnnnnnnnnnnnnnnnnnnnnnnnnnnnnnnnnnnnnnnnnnnnnnnnnnnnnnnnnnnnnnnnnnnnnnnnnnnnnnnnnnnnnnnnnnnnnnnnnnnnnnnnnnnnnnnnnnnnnnnnnnnnnnnnnnnnnnnnnnnnnnnnnnnnnnnnnnnnnnnnnnnnnnnnnnnnnnnnnnnnnnnnnnnnnnnnnnnnnnnnnnnnnnnnnnnnnnnnnnnnnnnnnnnnnnnnnnnnnnnnnnnnnnnnnnnnnnnnnnnnnnnnnnnttccccttctttctctctttttcttcctgtcttttcctttctttttctctttctctttctctttctttttctcccttccccttccccttccccttccccttccccttccccttcctctttttctctttctttcaggcctgggtggataggtaggtatttatggaaggcccaggtttgtagttcaggctgttcttgatctcaagatcttcctgctctccaagttctaggattatagatgtgtagtagcagtctttttaaaaatagattttacttagtgtatgtgcaagcctggttttgtgtgcatatatatgtgtatttgtcccctgttattggattcctgggacctggagttatgggcagttgtgagcccctgtgtgggtattgggaactgaactcaggttccctggaagagcaccaagagcagcaaatactctcaacattgagcatctctttagccctctgtaccaacaatgtgagaacttttaagattctaaaaggatgacattataatcacctcctgtgtatgtgcattttgtctttaaagatagattctcactacataatcttaactatcttgaatctgctttacagaccaggctgacctttaactccagaatctacatgcctctgtctcctgaatactaggattaaatacgtggaccaccatgcctggtgttctctattccatttttaaaccttggttttgtttgtgcttttagtgatgtacagtatctcattaatagactctgctaccctttctcctaaaacgtgttacatgttaataatgactgttttctgttaacagcaataataatcacacagagattcaggagatttctctagcattgagaagccacatgagtaaagcaccaagtaacacgttccaccctcaggacttttctgatgtcatcagtttcattttgtatggaaactctcaccgaacagggtaagactctttcattagaaaaaggtacttctcttaaaaaggccaggatgataattacatccagattcgagaaaatattatccaaggtgccaaattggaaggcaatattttttgctagctcactttggttttcatcaggtttagagagagtactgctttgaagattgtatttttatcaacaaaaaggggctgtgacattcattgatgattggcagttgactgatctgattaacatgaatcctttggagggagggttggaggtgatggtattgtcaaaatgttcagttagagtgaatgaaatgtaacctggcagccaaattgctaagagctgtgcaccccagcctattctatgatgcagttttcttttggtatgaaaaattggtccttactcccatgtaccttgcacttgttttgattattaaaatgaagttgtcattgtctgttacatatgaaactacttttcccaggaaggacaattggttagaaagattgttctatagctgccagaggctggataagcgtgaccaatccacaattccccgcaatcttctaaagacagatgctgtcctttggcagtgggctatttgggaagctgcgcagtttactgttctttcaaagttgcgaaccccattgggcagagctcaggacacgttccagacaattgaaggtaaccaacaatttagcattcttcaaaatttgtgatgcaggtgactttctaggtttttaactttagaaaccttggctttcttatactgaaacagatttcagagttgggttttttttttaattgaataatttctagatctttttagataagctttgttagttgaattatttgcacatctgcttttattcaaaagcttaggggattatatggacaaacggtttcctcagaaagtgagagatttttaatttttgttttaaattgatgaatatataaataggatatctggtaaattgatttattaagagttgtctctgattcagaatgttgctgtttttgttttcaggcatcattagaagtcttgcagcccacacactaaaccctgaccaggatgttagtcagtggaccactgcagataatgatgaaggccatggaagcaatcagcttagacttgttcttctgcttcagtatctggagaacctggagaaattaatgtataatgcctatgagggatgtgccaatgcattaacatcacctcccaaggttggtgttgtgaaatagtggtgctttgtaatagattgtgaaacctggtggggttgtatatggctgagatcacagtccatctggattctgtttatgtatatatgtatatatgtatatatttatgtatttaaggcatcttcatcatgattggaactagtcctgaatccttttcttttttttttttcaaaggtcattaggacttttttctataccaatcgacagacttgccaagactggctcactcggatccgcctctccatcatgagggttggattgttggcaggtcagcctgcagtgacagtgaggcacggctttgacttacttactgaaatgaaaacaaatagtctaactcaggtaatgtggtgtatttgggatgcattttaactgattgtaggaatttgagtttcgtctctaatggagttatatatagctctctctccctctccctcccccctcttcctccctccttccctccctccatccctcccccctctcccaatagatatagatatctatnnnnnnnnnnnnnnnnnnnntagatatctatagataagtttactttagttctttttctaggctttatccagtatcttacaaaactggtgacttttccattacaaactttacatcccattacttccccattactgatcataaaatttacttatgttttctatacagaacatgttaaaaatatgaacgtcttattcctaaagcctgggactttaggaatagtaaggaatttgtctgtggaatacattataatgtgtgggaaagttctttaattaggttcacaatagatgttttgtgatgattcttaagctatttaagctatctatgtgaaaatgattgttaaatataatatatagattgtgaccagatgttgtaagttcagtagagaattgaatttcagtggtatcgagaggtaatcttttgcctgttgtttccaggggagtgaattggaagtaactatcatgatggtggtagaagcactgtgtgagctccattgtcctgaagctatacacggaattgctgtctggtcatcttcagctgttggtaaaaaccttctctggattaactcagtggcccagcaggctgaagggaggtaagttataaaaaaagaaataagtaatggtgtttttatgtccaaattctttgtattgtataatattgaaaatggctttgtccactttgagtgttgtactataatcacttcaataggggaggcatctttcatttggtttttgattccagccatgtatgaatgtctcatttaagaggttacgagaaatcatactggaaagcaaggtctttcagcttcataaatagttttaacatgattttttgattgaaaaccaaaactctggtgtgatattgtgtgttgctggagtgtttgctcacaacgttgtggattgattacatgtgcagattgattcagttttgagtgaagagcatacctcaggcatttaagtagttcttagaaatttggagagagaaacaaccacttaaatttggaagaataaataacctggtgtctgcaggttttggtgtgcctataaagctctatttgttatgtgggtagtgttttcctcccctacagaaacagcagtatacctatggagctgcatagcttttctacacaacaatattctaaaacatctaatgtggtaaatattccacaatctgatttttcttaattgatactgctatgtatttgtgaatatatgataatttgacatactttatttgtggacatcaaagttgttattgatcatttccagtagttgttctatactgtcttggtgtgagacagagatctaatttcctcctccaaataactgactcattgtcttgcaattcattgagtaattcattttctcgtcattaattcttttaggattgagatacatttgagtaatttttttttaagaaataaggcttctatatttgcatttaaggtttgaaaaggcctctgtggagtaccaggagcacctgtgtgccatgacaggtgttgattgctgcatctccagctttgacaagtctgttctcacgttggccaatgctggacgtaacagtgccagccccaaacactctctaaatggtgagcattcagtgtttacatttaaaatatgccaaagataccgttcatttgtgcaggtaaacttccaggggtctgccttcttttcatggtatattaacagttctcaattttgtctttttttttttttttttttttttttaaacaaaaacaaaaacaaaacccttttaggtgaatccagaaaaactgtgctatccaaatcaattgactcttcccctgaagttatcagctacttaggaaataaggcttgtgagtgctacatctctattgctgactgggctgctgtgcaggagtggcagaacgcagtccatgacctgaagaagaactccagcagcacctcactcaatctgaaagccgatttcaactatatcaagtaagggctgtgtttgccagttacgggtctgtgttgtctgccatgtcaataagtagccttcctcagtagtgagaaataccaaaattggttatatttataacaggaagctaacagtcaagggagaaatctgcttagtgggaagatagaatcattaaacataaaaaggtcgtgctttagagaggctcacacagggaagctgtgtttctgaagtactgttgaatagttgaagacatttagttttaaggatgagagtttgtgaacatctatattatttttcttcattcctctttaattatccttctcaaaattgggaatttactgcattttagtcacatggctggtagggcaaagttcatcagagttggcttgctgtcaccttcctaaaaactgagaacagtctttgtgtagcaggacaaaacactgtttttagctcttcaaaatggagagtgaagaaacaggagaaaacaccttgacaaaacattaagtaaacttatcttttctgtgtctcaaggaaagcagttagtcagagacagtttaggatagctgtggtagattggagttagggcagaagaaatcaaaatagtaagttttgttttgttttgtttggaagaggagggcagctgaaagtcaaaaactgtagattagtgggaacatggggatccagccaccagaaaacccagggtcttgttttggtcactagacatgaacagtttatcaacatccagtacttaactctcactgtctcacttgagaaacaattggttattctggtctaggttggagcaggagttgggtaagacagccgatgaacatttccattgctgtttttagacctagtgataagagggaccagtgagagaggcagataaggagagcatgggagttggggtggctgggagtgggtgagtgtaggcagtaatctcagcgcatgagaggtaaagtcaggactttcatccttagttagataagtgagttccaaagcaatggagagctcgtcttacaaaagatagaagagagagatggagaacataaatcttcctcctggttggagagtatctgtggtaggacagtggagtagtgtggagcttagtgtgactgaggcatctcattttggcattgacagtggagtagtgtggagcttagtgtgactaaggcatcttatttcggcattggagcaccagggccataggaaatggctgcagataagaaaacagaaaattggaatctcataataaaacaggatctcagtgaaggagtcagggctaaggtacaaaacttagatgataggagacttaataggaaaagagtgtaggctctcaatggggagagaggccagctggctggatgcagtggcttggagagagcaaggattgaagacatattgtagagtctattgccagtatattaacaggcacccgggtcactcactacagaaagaaggaggagacaaagggcaagcaagctcaactaactggttgtcatagctaggaccatgttttcctgtttgcctgtcattgcagctgtagtgttactgaggtcttgggaaccacatcaagataaaacggtgctttgcttgtaaatgccatttctctagatggctgcttcctccagtgcttgttctccctgtagtccccagtggttatacaagctggtaaggcctaacccagactgatggacattttaattacaggtcactaagcagcttcgagtctggagagtttgttgaatgcactgagcagttggaattattaccaggagaaaatattaatctacttgctggagggtcaaaagaaaaaataggtatttgggaatggttttaatttttttttcattacaagattattcattatcttttcctaggaaatgcgtaagtttctgtctgtttatttagagtcctagactatttgtaagtttctgtttatttatttggagacctagattatgcaaagaaatagaattagggttgtgctagtaatagtttataaagcaaatgaaaaatggctcagttagaactaaactagaaagatgtgatattgatactttgagatgaatgtagacatttagcttgacaaagtaccaagcagtgttttgactgcagttttcatcttgatgagcacactgcacactgctttgtgacgttgagacgtctgctgtgttttgagagtagctgcattgtgtaaggctctcaagtacttctggagagctacacaaatgcaccagggacattcttgatgtgtataactgaaaaggcagtttccctcttgacttaatgtgtcagttttgtttccacgtaattaaccttttgttaaaaggttaaaattgaaaaagcattcaattttaagaatgagagaaaaatttattttaaaactaattttcctttctgaaatttttgtgtgtgtctgttcccttggaattcagtatgtcgactttgcctgaattcatgagatctttttacctcagcctcctgagtgctgagctccacggtacctggtggtttggtttcttataggaggtgctagattagtgggttgacttgttaaagagtattcatctctgaacttgaatttcaagtctgtaataattacagattacttgttttagaattattttagtttttctggtataaatgaatttgctacacttacttagttaaggatatacaaataagtttgagatttaggagcttgctcagtcactaaaatgcttgtcacacaagcatgaagagctgagtataggatctgtgtcaaaaagctttgtatgattggatatgcttgtaaccccagtgaaaggcaggtagagtagagtggccaatgagatactgtctcaaaacaaacaaagatggataataatactcaaggaagaataccagaggttgacctctggcctccaggtgcacacacagtgcacaccactaaataagtaaaaaaatgagcttaaatttcatgaactaaagtggaggaaaattcactgaaatggttaaatcctttttagaatcaagttttagtctatttttgagcaaagtatggatataaaaagaagggtgaaaataggttgcttgctagtgtttgcgcttttaagggcaggtaattcttagagtcaggaagtataattttatgttaaataatgctgtttatattgtgatctgaaatgctttatgtttaactacctaaactcaatgaaaggaagctttcattaatgataattaagtattgctagaatatattaatacttgtgtacattagattcaaattaatttatctaacttgtttagatatgaaaaagctgcttcctaacatgctaagcccagacccacgggagcttcagaaatccattgaagtccaactgttgagaagctcggttttcctggcaactgctttaaaccacatggaacaagatcagaaatggcagtccttaaccgagtgagtctctagtgtacattggcttcaagggatgctgtgattggcactatagatgtacagaaacccctaaaagtatatgtctgtctttgctcacagtctactatagagcaggctactttttctttctatgacccctgatttttgttgccaaatgataatgccttagtgacttgatgttaatgactacaagctaaagaatgttaattgacagcaaatacattctttcagaaatgtggtaaagtacttgaagcaaacctcacgcatcgctattggaccactaagattgtctactctaacggtgtcacagtccttaccagtactgagcaccctgcagctgtactgctcatctgcactcgagaacacagtttctaatagactttcaacagaggtaggtagattatttgttgtttgttttgtttttgctttttccttacattttttaaaaatttagtttatgtctatgaatgttttgcctgcctgnnnnnnnnnnnnnnnnnnnngcagtccttaaccgagtgagtctctagtgtacattggcttcaagggaatgctgtgattggcactatagatgtgcagaaaccccctaaagtatatgtctgtctttgctcacagtctactatagagcaggctactttttctttctatgacccctgatttttgttgccaaatgataatgccttagtgacttgatgttaatgactacaagctaaagaatgttaattgacagcaaatacattctttcagaaatgtggtaaagtacttgaagcaaacctcacgcatcgctattggaccactaagattgtctactctaacggtgtcacagtccttaccagtactgagtaccctgcagctgtactgctcatctgcactcgagaacacagtttctaatagactttcaacagaggtaggtagattatttgttgtttgttttgtttttgctttttccttacatttttaaaaaatttagtttatgtctatgaatgttttgcctgcctgaatgtctgtgtaccacttacatgtttggcacctttagaaactgtaacagggcattggatcgatcccttaggattcgattgacagatgggtgtgagccaccatggggctgctgggaatttaacatgggtcttctgaaagcatccttgaagtggctttttctttttctttttctttttccttctctctctctctctctctctctctctctctctctctctctctctctctctctctctctctctttctctctctctctctctctctctctctctctctctctctctctctctttctctctctctctctctctctctctctctctctctctctctctctctctctctctctttttcgagacagggtttgctgtcctggaactggaactcactttgtagaccaggctggcctcaaactcagaaatccgcctgtctctgcctcccgagtgctgggattaaaggcgtgtgccaccacgcccggctgaagtgtatttttgtaagcgttttctgtgagtattaataagatagtatagatcaaaatcttcatttttctcagtttttaaagtaaaatttataattgaataaactggtgaactcagaagtctaaaataaatttctagacannnnnnnnnnnnnnnnnnnnttttctttctatgaccccctgatttttgttgccaaatgataatgccttagtgacttgatgttaatgactacaagctaaagaatgttaattgacagcaaatacattctttcagaaatgtggtaaagtacttgaagcaaacctcacgcatcgctattggaccactaagattgtctactctaacggtgtcacagtccttaccagtactgagtaccctgcagctgtactgctcatctgcactcgagaacacagtttctaatagactttcaacagaggtaggtagattatttgttgtttgttttgtttttgctttttccttacattttttaaaaatttagtttatgtctatgaatgttttgcctgcctgaatgtctttgtaccacttacatgtttggcacctttagaaactgtaacagggcattggatcgatcccttaggattcgattgacagatgggtgtgagccaccatggggctgctgggaatttaacatgggtcttctgaaagcatccttgaagtggctttttctttttctttttctttttctttttctttttctttttctttttctttttctttttctttttccttttctttttccttttctctctctctctctctctctgtatttttgtaagcgttttctgtgagtattaataagagtatagatcaaaatcttcatttttctcagtttttaaagtaaaatttataattgaataaactggtgaactcagaagtctaaaataaatttctagacagatttttttcctttgttttttttccctttttttagaataatttttattttatgtacattagtgtcttgcctgcatgtatgtctgtattgaggatgtttgatccttgaattatagacagttgtaagtcgctatgtaagtgctgggaattgaacttggggccactggaaaagcagccagtcccttcaatcactgagccatctctcctgcccctctaggcagattttcatttgtgatagtatagggcagacagaagaacctgaagttttgaacttttggtttttcttacaggtaaattttggatttgactctaaataaagtaagcttcaaccaaagagagaacctttgcaaaggagttgcaatcttggaaagttatagaatcagtagtttaatgcttttctcgaattctggtttatagtaacagatgtttttacaaatgtacttttatttagtaaatatactaacaaattgtacttaatatcctggatttatttaataaaacaaaggttttctgtttgggtgtggcttagtttctttttcattgctttaattttataccatgaccaaggcagcttataaaagaaagtatttgatttggagctgatagtttcagagggttagagttcttgatgacagactataggcatggctgccgagaccgtaggttttgatttccaggttggaggcagagtgagtgagagacacagaatgttgaaacttcaaaccctaccctcatttactctattccttcaacaagaccatatccttatccttcccaaacagttctaccagttgggaccaagaattcaaatatattaaccacaggttgcaagagacatggtggaaggttgtaggaaagttggaatagatctaaaaggctatagtctatcccaagcttattaggtgagattgttttacacagtgtttgtctatctggcaggactgtcttatcccactctttagtgatgctcttcgctcatgtaagcaacatgatgtgcggccatggatgcaggcactgagatataccatgtaccagaatcaactgttagagaaaattaaaggtaacacattcccacttccccttccccttccctccctattctcatctcttgcagcaaccccttccggaacttactgtgtagacaaggcttacttcaaactcagagatctacctgcctttcaagtactgcgatgaaaggcacatgctacgtcttggcccaattttctttttcttaaagttagcttcactgagatgtaaattacacatttaagtgtgcagtttttttctcccatcttcctctgtgtacccagaaaaatcccgtgtctctctgttcattttcttactgttgccccatctcgggcagttgatgatttgctttctatcactgtaaattagattgatctttgctgtgtcttcacataaatggaattgtactgcatgctactatatttggtgtctctagcttacatgatattttaaaggtttttccatgttaacttgttagtcaagtggaccttctttattattgtccagtagtatttcactgtatggatgtgccaccatttgtttatttttccattctctggtatgagtttgttctcagtttttctagttgggtagctaagcatgaagctgctatgaacatttgtattatttttcttgcttcagctaaaacctgacaataaacttaaggaaagaagggtttatgttggttcaaagttcaaggtacagctcactataatagggaaatcatggagacagaaatgcaaggtagccaccaggaagcagagacagatgctaatgcttagtttgctttctcctttttgttcccatagacactgtagtgcctagactgttttttggggtgagttttcccattttaaaagctaaacctttttggaaacaccctcacagatgtattcagaggtctatttctgtagtgattccaaatcctgtcaagttgacaggacaaacggttactatatttatgttcaataccacagtcaaatcttggggctttttatctcttgagttgaagtgtaggagtgagattgttgcattattggtttctactttgtaaataattcagtatttcttagatagtggttatgcctttttaatgttttttagtatttatgaacgttccagtttttgtcttgttccttttttttagtcaccgaggggtataattttagttcatgattttagtttgtatttctctggtgctagtgcatttcctcattttctttgcacagatactattttgtgctttatgtttcaaatgtctcttgacatcttttgcctgcttttcttttttattgggggaggaggcaagatctatctttctgtagccctagcacttgatattcaggccaggcttgccttgacctcacagatatttgtcagtctttgcccctgaatgttggaattacaggtatgaccaccatggctggcttttctctagttttggcagggtctcactgtgtagctccggttatctttgaatcgagagtagaccaggctattcttgaactcagagatacagtgctcagattaaatgtgtatgccaccatgtctagcatcttttgctcatttttaatgaagtaataaggcttgtttatgtgttctatgtacaagttctttagcatttaatatgtgctacaaatgttaaggattttcaaatgcttcaaatgaaaaatattagagaacgagtatgcaaattttatctttttttttctaaaaggaaagtgtctcttttattgctatagaatagtaccttgcctcaactcagttctatagttttagttaattatatgtgactaaagttaaagtattaaatgttaagtaaatccacttccaaaataggccttggattactagacagttattggcatctgcctacgatagcctctcattgggtttaaaacattggttcagcatttgcacattgagggcccttagcctgaagcatttccaagttgctttccttgtaatttatgtgagaattatcccatttttgaggtgagatatatagaagtcttagcacaggatggaggcataaacagggttgaaaataccaccatgtcttttccttgctatatgtatcattggaaagtcagtaacctaactttttgataaacaacttcattcccaatcagttttattcattagacacaatctagaagtagtagtttgtagcattagttagcagataatggcaagcaagatgggccttttgtcttcattgttacaaccaaggagattttaaagtccagcagggagaactgagcagtgaatgaatgaacaccacagtactatgctgcatggaagcgtggaagtacatatataggcagctaaaagagcatgcaacaggcatctctgatctgaccataggaattagtagaaaacttgtggagaaagtattaacatttaatctgaaaattgagggtagaaatgagaagaaaggaagggtgcattacttaggtaggatatgaaggttagagactgtataaacaaattcttaggtgactcagtttacctgagtagagctgggtgagattttggtgggatgtcagtcagcataaggcatcagtggaaactcctcactttgaggggcagcagaaagaaagggctctgtgggtttttaggaaaaataaagttccaggtttacttgtgtgtaatcacttcagttgaaagttatcttgtggattagaatggggtaagagtgaggcaaagggaccagcttcctgctgctaagcaaggtacttaggaatgacattaaggagggaagaagcaaattatttgtggaagttgaaagtaactgctcaggccttgggcctttctttgagaaaaggtaaacagaaaaagggtgcagttttaacaagcaacagggaatccacttaacacaggttccaaggcctttagaatgtaggtgttcacttggcaggtaggactctgctctctgttctgggctacatgtttaggaatcatagtattggtacggctttaaagccacaggatagatgccttgtccaggagtcaatgaaagggaaggggtctttgacttctttgacctttatttattctttttcctgctgtttggccaagattcttcatttcctcttccccctccccccctccttccttttaaatgcactgtgttcaccatttaaaattttttttaattttatgtatatgagtgtttgtctgcatttgtatatgaaatactacatgtgcctagaggccagacctggaactggcattactggcagttatgaaccatcccgtgggtgctgggaatacaactgtccctgcaagaggagtagcaaatgttctaaactgacaagctgtcttctccaggctctgatggagctcttttctgacaattccaatgttacaaggttaatttcttgtagagaatgattttctctttgctctacttggtagtgtttcttcatttcaacactgttctatgctaagcattgtgctagctgttggggtttgagggttgagagatggtgaagaagaacatgcttcagaaatactgcctggagtcaagtgagttgggaactaatgaaacattttcttctttccagagcaaacagtaccaattagaagccatctcatggagttaggtctgacagcagcaaaatttgctagaaaacgggggaatgtgtcactggcgacaagactgctggcacagtgcagtgaggttcagctgggaaagacaaccactgcccaggacttagtccagcattttaaaaaactgtccactcaaggccaagtggatgaaaaatggggccctgagcttgatattgaaaaaaccaaattgttatatacagcaggttagtaaactgaatgcgtgcttctgtgcgtggtataaagaaatattttataaaaacaattatttccagattttgtagaacattatttatggcatgctggtgttttatagttgatacttgagtttccaaaatatttaagtttaataaagtgtcctttagtaagacatattttcaaagatccttgattgttcctggatttcattgtttccttttggggaatgtggtgtgcctacttatttgtctttgtaggagccatgcctacatataagttcagttcatgtgtgtgtgcatgtgtgtgtgcatgtttgtgtgtggaccaaaggttgacagtggatgtccttgattgttatacatctcatattactaaggcaggaattttttcatttgaactcctatccattctcagagagagtgctagggttgcaagcagtctgtcgtgcccacccagcatttatgaggattcaaactgtagtcctcagtgcttacacagcaggcatttaacccacgagtccattttcccagctcttgaagtttttattattgtcactattaacaactttcctagctggcctgaaacccactgtgtcaagcaggctgacttcctcttcctgagtgttgagattaaagacgtgttaccatgcctgccagactttatgatattctattttattttgtcttagtttttgttactttatttatgtgttgagtgcctccatgcatatgtatgtaccacatacatatgtgcctgctaccccagaggccagaatgtgctggatcctctggaactagagttgtaggaagttgttttgtttgttatttgttttttccagacaggtttctctgtatagccttgactgtactagaacttttctgtagaccagattagccttgaactcaaatatctacctgcctctgcctcccaagacctggaattaaaggcatgtgccaccaccttgaatttatgtttttaaaaacagaaaataagtaattacttcatcttgaaataaattatttaccactatgggtaaattattggttttatatgtatatgtgttttctctctctcttttttttccctgtaggccagtcaacacatgcaatggaaatgttgagttcttgtgctatatctttttgcaagtctgcgaaagctgagtatgcagtggctaagtcaattctgaccctggctaaatgggtccaggcagaatggaaagagatttcgggacagctgaggcaggtgtacagagctcagcagcaacagaacctttctggcctttctactttgtctaggaacatactcgctctaatagagctaccatctgctaatacagttggagaggagcaccctcggattgagagtgagtctacaggtatggtttcattcttttgttagctttaaaaaataccaacttcataaatgtaaaatcagtgttatgttagctataatttgccacaaaaagttcaactacaaaatgttgccttgcagtaacttattgtgtgtctaatctttgagatgcaagttgttgtcctgactagatggtatttttaccttgtttcatgaaggagttagtgtcaggaacagcagacatgtagcaatagcttgtattacgttacatatggttgttggaacatagaaagactcaagtgtcttattgtgtctgacagtggccaagaaatagatggttgattcatctaaacagttgatttttttttttttttttttttttttttaggaggggaagggtgttagagattgaatccaggttcttgggcatgctagctataggtttattttattgtcacacataaaaggaaaggggaattttccaattgtttcccaataaacaatgtgcctgtgaaactgcagtaagtctttaatccttgttgctttgacagcaggagggctggtccctgcagaactgtgctctagggaaaggatccatgcttctatatataagtagaatttttttccctcagaaaagtaccgcacctcttgtgggggtccaacagaaaagcagttttgtttgtagggtgtctcctgcaggaatgagcaactggtcatagctgtgtggaattagatgaactagtctgcacacataccattttcaacacataagggaggctactaccaagctccatccccagtttctggtttgttttgtttttcccccttttttgagatagagtctcccttgccttagaccctctggatccctttttttgcgtggaatgggtctctagtctcaggcgggcaaagcgtccgatggaatgacagagagatgcacacaggagaggttgtgtagaatctgaatgtaattttcaaatcgagcatcaaactttttatacagtagaaaataaggaagttgggtgacacaccagcaaggcacaaagaggttactggattcttacataaaatagaggaatgcaaacacagaaggtctaacaggaaccaccacctgggatagaattcattgttaactgcgatcaacaagagctccacctaagattcacttaatcttagaagccagggtcaagggcttcgtgcccttgccatagttcctattttagtctattgtatagtccacctttcccctaggccattgtaaatacgtgtgtatgggtgtaactcagctatctatagttctaagtatctattctggttcctctttaggtctcaaacttccttcttcctagtggatggtaattcctgtgtagggcagtgacctagctttcattcaaagtgaaagtgtaataccagaggcaattctgaatgtcactgaatagcaacattcttactgaattccaagcccttggtcagctaaaggactttctaggactgttggaatactggtaaaggcttagctatgtcagaactcaatcttaaaaggcacttataataagataatactaaaagagagcacgtggatccatacaccagactaactcgggaatggaatattaatgtatgggttagagagaacgccagcctccaggaggtgagtttccatgaaactctttgcctcgtgggtggcttccaggcctctcagcttgtcaagttgactccactggagtgcgtggcactccctatgtagatccactggcctagaacttatgtaggccagactggcctcaaactcacagaagatcctcctgcctctcttgcccaactactatgattacaggaatatgccaccacacccatcagctttatatttcttttgagacagtatcttccttcctacaaagcctagctggtctcacactcaaaactttccttcttgagttttctaagtgctgacttatagggaggccgcactgtctccctcccctgacccctcatcccccccaccttcacgtttgtatattttactagttacagactctgtgcctcatgcatgctatgttgacgtactattgatttattaatcagtttggaagataactaatcttttaactgacaaaggagaattcacctccattttatgctgaagcttggggtttaaattttgtttttgttgtccactagtttttataattctagtgtgtatcttaaccaggtctttatgtttataagggataggccttaaaatcagtgtatgtcatggcgtatgaactcactaaaccaggcagttttctttatttaatatgaaactaaagatctgtcaagcctgtgggtctctgtggtttgcttttcacctgttcattgtttttccaaatgtttaaaatgattctattcattagggaataaccgctcaaaagcaggatttaagacattctatatcatgtctgacacctgagctgttgctaaagattagtgtcattaaaggtacagatgtttctacagatgcttatgtaagctgatgggagaggctgatgtctattagtatagtcatgttgcagaaaagtatccaaattttgtttataacaaattatgaactgtgataatgggctttttgcttgtttataaataataaaatcttcacaggtcagtcagagcaccattagatgtttctgcatgtgacactgaactcttgttcttttccctgtcatggcagtgcatattggagttggagaacctgacttcattttgggacagttgtatcacctgtcttcagtgcaggcacctgaagtagccaaatcttgggcagcattggctagttgggcttataggtggggcagaaaggtggttgacaatgccaggtatgtatgtttcaatgtgtagttgatataaccctctgcaaaatggaggtataaaatgttattgggagagtttggtagctgaaatatttgatgacttgtttatttttatagtcagggagaaggtgttcgtctgttgcctagagaaaaatctgaagttcaaaatctgcttccagatactataactgaagaagagaaagagagaatatatggtattcttggacaagctgtatgtcggccagcaggaattcaggcaaggaaaacagaacacagtgcatcctgggggagtagtgccaagattcctgttacaactcagttttttgggaattggctactttattaaatagtgaatgaggtttaggctgattgtgttgcaagtacaattggctttgttgataagcatattatagagagacgcttactactgggtttagtatttagtgtgtcatatgtgagaaaaatgttcccacatgatagtcagatcatgtatcttccttttcaaggtaagtgttattctatgcccacattttctttaggatgaagatataacacttcagataacagagagtgaagataatgaggacgatgacatggtcgatgttatctggcggcagttaatatcaagctgcccttggctttctgaacttgatgaaaatgcaactgaaggtgttattaaagtgtggcggaaagttgtggacagaatcttcagcctgtacaaattgtcttgcagtgcatattttactttccttaagctaaatgctggtcaggtaggtggcaccgtcttctaagggaattcatttggaatttcttttctatagacaaagagtggtagcagaaatggtttccttatccccttaattgttcacttaggttctgttagatgaggatgatcccaggctccatttaagtcacagagcagagcagagcactgatgatgtgatagtgatggctaccctgcgactgctcaggttgctagtgaagcatgctggtgagctccggcagtatctggaacatggcttggagacaaccccgactgctccatggagaggtaatggcctaaataaaatgccctgccttagtatatatgtttctgagtgggatagaaatagtttgtttctctgtgttatgtatttgaaaatgttagagaatatccatgctacttcatagaacaaccaggacagtttggtgtctcatgaaaagctctcctctttcctactttgtagagatctgaaagtctagaaggcagaagcttttcattatcaaaaattagttttggagagggtggtgaaaataagtgttgaggacttagtataaccatttgtcacagttattattatttttttttgccttctttgaggcatatgctgaacattcagtgctttaattcctctagactttgattatagttctacactaaacagacttgcaaagcaagtatcatttcatatgggcctttgtcattacacagagaacttggcctttaggatctttgctgatactgacataatcaggttttttccttttgcattcctaaatttcatacattttattaactttgttttctcctgaaggcattattccacagcttttctcacgcttaaaccaccctgaagtgtatgtgcgccagagtatttgtaacctcctttgccgcgtggcccaagattccccacacctcatattgtatcctgcaatagtaggaaccatatcacttagcagtgaatcccaggcttcaggtatgcaacattaaaatgtatttatttatttggaacagagtctcactatatcaccctcagtagcctggtacgcactatttagatagctggttttgcacttacagagtgctgaggttaaagataagtgctcctttgcctagctaaaatattgctactttaaattattttaccagtaatttttaagtgtcattttgtgtgatgtatttttgttaataatggctgggacttggtgaagaagctactatgtgtctaagtgttttgcatgttattcctccttaccataccgcaggagcttagcatagagctgtttaagataaacattagagaatggtctacacactctagggaggcttcctgtttgcttgccatcttccccagcttttctccaatagtttacattatttatgaacatacatgaaaagcatcttgtaaaagtacagaacaccacagcctgaagcttcgtgcacaacactgtgaactagagtgtccttgcattccatacccaatgtgtgcatgtactcctgttccatcccactgtaggaaataagtattcctctgcaatcccaactttacttggaaatattcaaggagaagaactgctggtttccgaatgtgaaggaggaagtcctcctgcttctcaggatagcaataaagatgaacctaaaagtggtttaaatgaagaccaggccatgatgcaggattgctacagcaaaattgtagataaactttcctctgccaacccaacgatggttttacaggtataagaaaacttatttgtttgttacaaagtagtgttcattgcaagcccctctcccccaaatcaaaactaatatctcttaggagaatcatatcatagaaccaaagctttacaaataattggaattggtttcactagtctatattgatagtgctgctgataaatttttgagaaatgagcattacctctgtattcattggatgctgccttgtgagccatgtggatgtgttgtgtctgcaggtccagatgcttgtggcagagcttcgtagggtcactgtactctgggatgagctctggctgggagttttgttacagcagcacatgtatgtcctgagacgaattcagcaactggaggacgaggtgaagagagtccagaacaacaacaccttgcgcaagtatgtcttcactcctttgctggaaagatggggctgctgcttttgtcttttagatttatctgttttatgtgtgtgagtgtttgcctgccgatatgtatgtgtatacctgatgcccatggaagtcaggagagagcattggatctcctggaactggagttaagaatggttgtgagctgccatgtgggtgctgggaacggaatctatgtaagagcagctggtgctcttaactactgacccatctttccagtgctctccctacttttttcttgttaatgtgttaatcagcacgtcataattcgtagtcttaaccatatttaactgtagagtttagtgctggccgtattatgccttcattaccactaacctctcctagaataatttctaacctcagataggtgtatagttgagtgctcacagtactgtgccttcattaccactaccctctgctagaataatttccaatttcaaataggctctgtacttagtaataaactctgcccctcattacctctagttcttatttcttgctcttgctttatgaactatcttgctttaggtgtctcatatcagtggaatcattcttttgtaactttttcatttagccctaggtttacaaggtttaccttgctatagcatgcatctggttttttgtttttcatgattatagaacagtactgaattgtatagattctccagattaggaaatttttatcatttatatatgtgtgaatgctgttcatatgcagatcagaggaaaacttgtgcagtagggtttttccttttttccatgtagnnnnnnnnnnnnnnnnnnnntgcagtagggtttttcctttttccatgtaggtcttggataagtctaataacttttggttatcagcaagtacccttaccatgtgagccattgtgtcagccctcataaaccatattttactctttgattcatctgttggagacttgggtttgcttttagctgtgtgaccactgctgctctgaacattagtgtatagtaactgtctgagtccttggattattcagtatgttacttggtaaatttactgactaatgtgattatcttgttaagccaaggaatcttttccacaaaatttttgccattttatgttcctattttcaatgcatgaggattctggttttctcctattgttgccaacattcattctttctctttctctttctctttctctttctctttctctttctctttctctttctctctctctctctctctctctctctctctctctctctttctttctttctttctttctttctttctttctttctttctttctttctttctttctttctttctttctttctttctttctttctttctttcttttggttttcgagacagggttcctctgtatagctctggttgttctggaactcactctgtagaccaggctggcctcaaactcagaaatcagcctgcctctgcctcccgagtgctgggattaaaggcgtgtgccaccatgcctggccaattttgctaacatttaattgtatatttgtatatatgttgcatggtgtgtatacattcacaccatggcctttccaaagaggtcaggggacagccttgagtgttgggcctcatcttccacctacttaatgcagaagttccctcactcccacccattttctgctgtgtacacgaggctagttggtccatgagcttctggggattgtcctttctctaccatgtgtctctctgtcatgtgtctcactactttttctggctttcacatgacttctgaggattctaactcaaatcctcatgcttatgtagtagactcttagctacagagccatttctcagttggtagtttctgggagttctgttcacagtcctcatgtatgctaagttatctcattgtaattttgatttgtgttttcctaatgagtagtaacgtgtagcttctttttgtatcttaagtattgagtgtgtatgtttgaagaatgttgaattaagttgttttgctgttgagatgtaggatttaaaaaaagtcggggtaagaccttggagatgcatgatttgcaagcattattagccactgttttcagttgtccgtttggtctgtgtggcacaatattcaaggaattacagataaatctattgtaaagatccccttcccttatgcttttgatagttttagtttttctgcatctagatatctggtccattttgcattgtttttgcttatgattaagattagggctcaggccgggcagtggtggcccacacctttaatcccagcacttgggaggcagaggcaggtttgaggacagcctggtctacagagtgagttccagggtagccagggctacacagagaaaccctgtcttgaaaaacaacaaacaaaacaaaaaaaaaagattagggctcagatcattttcactaacaaaattgaaaggcaaagcagtctctcttatttattgattttgttttttttccttaaacagcattaggtagtaagttatttgtcagtattttacttctcttttgatactaaataaatttttgaatgaaaatgtctttggtcagagaagagaaaattgccatcatgcgagagaagcacacagcactgatgaagcccatcgtgtttgctttggagcatgtgcggagcatcaccgctgcccctgcagagacacctcatgaaaagtggtttcaggataactatggtgatgccattgacaatgcccttgaaaaactaaagacgccatcaaatcctgccaagcctggaagcagctggattccattcaaagaggtgcatagtagttgtaaaagtgctgtgagcgtggaaagtcccccatgagacacaaagttaaaacagcttgctgacttcggaacacaagatgaaagttttataagcccgttgaagttatcttgtttttatttattggtcaagaaaagggagaaaagtgtttttacttattttgagggtctgggaaccgggaggcagggaggatggcaaacacaatgcctgtattttactaagcatgtcctgtaaaggcattaactttagctgctgttttgtattcttttttataataataataataataataataataataattattattattattattattatatgtaagtacactgtaggtgtcttcagacacaccagaagagggagtcatatcttgttacggatggttgtaagccaccatgtggttgctgggatttgaactcaggaccttcagaagagcagtcggtgctcttaaccactgagcgatctcaccagtcccctgttttgtattcctttaggagataaggatgctgatgtttttgcctatagtttttaaggggacaaataggcatttctttttttcagattcagcatcacaaatttggaatgctccaaaaatctaaaacttttggagtaatactcagattttttaattagtggtttacagtaagactaatgctgatattttaaaatctgacgatctatgaagtctgaagcaccccgagtaataagatggattaatattgacctattttgtcatcaatctagcaatgtattttgctgattgaaatgatttgtggattcagatatttgagaatctttgtcttgttttccttaattctgttttctctgtggtctttttcatagcaatggcaccatcactcagagtatctttgtatcatactttttcttgtttttctcctttctctgacacttaggattttagctggtttctttgttgggctttactatcgtggaaacaagaaaatacaaatctaaacagacgtaggaacaaaagttcatacaccttcagtaaatgaaaactgctaactcattgggcatggtggttatacttaacctttaatcccagcacttgggaagaggaggcacacagaagagttcaaagctagcctggtctacaaagtgagttgtagactatctagggatgacacagagaaccctgtctgggaggtagagagggagagagggagagactgggaggtagagagggagggggggaggggagagaaaagagagaaaggaaaggaaaggaaggaaggaaagaaaggaaagaaaaaaaaatcctgaaatactagataagaaaaatcctgaaaactcataaaaaatatggtgtttgtttttacaaggttctctgtgtagccctagctgtcctggaactccctctgtagatgaggcttatagagaaccacctacctcttcctcccaagtgctgggattaaaggtatatgccaccatatccaccttactatggtgtttcttatgcccaatcagcttattaggtaggtccaggttttgagattcaagaccagattcttacttgtttttattagttaaaaacctggaggagatgtatatgaaataaatcattgagaaaagtttttaagattgtagtttaggctatagagatgactcattggttaagagcactggttgctttcccaaaggacctgggcttaattcctatcacccacatgacagctcacagctgtctataattccagttctgggtgggggtgggggtggctgacaccctcacagcgacatatagacaggcaaaacaccaatgcacataaaatggaaataaatatttatttatttatttatttttaaaaattatagtttgttgttgtatgttgtatgttgatagcattggctgtcaaaactaaggggccttgtatgttaggttagcactctaccattcctaaatctccagattttccatccctgctccatgtttgactaaacatagtctctttatgtgaacatggtagtttatttgttactttctcttgattaatgggagattttctagtttgtttaattttttttaaacaacttactgaaaattgctttgaaagtttatatattagtttgttaatccagatatacattaacaggggtagagctttgctttattctttgttccccggggattgatctgtgtttgatacattcattgctccctgtggttattagcagtggttctcatgtttgttagtttgttttttccatatttcaggtggtcatctttaaactgttacttttgttaaaatattgtctggtacagtgttatctgtgctgtttagtttgtacagcctcttataaattcataatagagctgtatttttgcttataactttgtatcagtaacttagcaggtggtttcccaaggctgtctctgctgttctactatggcaaaactgatagattactgaggcatagtccgcggcttcatagagaccctctgtgggaatttctcccatggctcctcttgattcttgttttatttggcaaacaaaggatggcgtcttaacaaagtaatcatgtacaacatattagcacagcactccttacttcaagagtggtcctcatccctagcatcaaatcagacctagagactaaaacagcaggaatatatgggggtgtttgggtttatctttatgccaggtacagtgagaagaaaatatgctacaccagaatgcagacttctttttttaccttgtgaacatagataatgctgagtttgcaacagagagcgcagaaacgagcaagctacatcttgcgacttgatgagatcagtccttggttggctgccatgactaacactgaaattgcacttcctggagaagtctcagccagagatactgtgacaattcacagtgtgggtggaactatcaccatcttaccaactaaaaccaagcccaagaaactcctctttcttggatcagatgggaagagctatccttatcttttcaaaggtagagctaaaactaagttgtattttttaagacaagtgtgtgactgactgttaatgatatgtgcgtgtgtgtccatgtgagtgtgcatgcacattaggataagactgctattgatgaattctgtatttcttgtgacctatgtgattttgaatgattggttggctgtatgtcacagtgtttctccctctgcaccttgcaagtacaactcagtgttaataactagttctaataccattaaattcaacttgctattgttcttaagtctgctttactgtgttcattgctaactgaaaatgtaagaagtagtatagtccctggtaattttgattttgtattcataggactagaagatttgcatctggatgagagaatcatgcagtttttatctattgtgaatactatgtttgctacaattaaccggcaggaaacaccccgcttccatgcacgccactattctgtaacaccactgggaacgagatcagggctgatccagtgggtggatggagccacaccattgtttggtctttacaaacgatggcaacaacgggaagctgccttacaagcacaaaaggtttggtaaaactcaagtgcacctgtgttcttactggactatgcatgaacaagtgtgtatcagggcattgttagtgactatgtgaagttaaacacatgtacatgtgtctgggttagagtaggcagagttgatgcccttactaagtggtggtgaggaaactactcacgactttattgaaaagtagttttttggttttttttttgtttttttgttttgttgttgttgttgtttttttgttttgtttttgtttttttttggtttttcgagacagggtttctctgtgtagccctggctgtcctggaactcactctgtagaccaggctggccttgaactcagaaatcctcctgcctctgcctgaaaagtagttttaaaacatatgtagttcctaatagctcagcaatttgatatttcctatcttaaatgctcttaagagcttttgagttaaacttgtaaataataaaatgctttgaaatccagatttaatattcattatttaaataagaacattgacttatttgatcagtacagtatcctttttttgtacctgtgaaatttatatgtgaagccgcagaactgcggaggaggcccagatccagtacattgcaggcggttacctcaagctgctggagcttaaaaagaatcatgcttttcttctctttttatgtatttttgtggtggaatctaattccatggctccccaaatgctaagccttcctgtaccttcagcctgggaagctaagtttcaaaagcaagcacaggtctatagtcaagttatcaaagaataagttagagagctggaggagctgtcccaacattgtggaatatgtttcttaatagattatttatttcatattgagtaaatcatcagggaagaatcaaaatatgcactggtagattatgcctttaaaagtgaattgtgttataaaaaatatagattggattttatgttggacctcaagaaaacttagagtccaatctttaaacaaactcaatcacaagaaagagaagataaatagtccagaagaattgatttttgattttcttttgtttttaaatataaaatgtagacagttaggtggaaaacactatgaaaaataagtttttaaaagtactttgtaatccaacaataatgggctcttttgtgtctctaaaaccctacacagtattttaaggaattattatacagaccaaatctcatctgagctcaatataatgctagcctgtgcctaaaatggttatttttccttcttcatgtgacctatgaaaataaatgaataataactcaaaaaaagtactttgtagtttttgtctttccttaagtaaaactaatcttttcttttaaaaaattcttttaaggcccaagattcctaccaaactcctcagaatcccagcattgtacctcgtcctagtgaactttactatagtaaaattggtcctgctttgaaaacagttggccttagcctggatgtgtcaaggagggattggcccctccacgtgatgaaggcagtgttggaggagttaatggaggccacacccccaaatctcctggccaaggaactctggtcatcttgcaccactcctgatgagtggtggagagtcacacaggtatgcagcatgtggggggttaggtgtcaccaatgctaccctggctttgatcagattctctttgttagtttttgtagtctttctctttccagactttgtagttgattcctgtacttgagtggtacttgagagttataaaaatgtggcagtgattgtaagggaagggttgtggggatgatggatggaattaaaaagtaaatatgaaaagagctgaaggtctttattttaaaacctagtcttctcggctggtcaaaacccccaacactcaggaatcagaggcaggcagatatctattaaagggcagcctggtctacatggctaacctgtctacggcaaaacaaaacaaaacacaagaaaactacccacattatttctggggcttgtgagggagggggcttagattctaagagtatgtaactgctctttcagaggacccaaatttggttccatcacccatatctgggggttcacatttgttgctactctggctctgggggattcagtgccttttgtaatgactttctggactgcaccaatgtgcacatgtccacacatagacacataattaaaaattgaacccctctcccaagctttcatcatattccttagatctcagtgttaaatgctccttatattatgactatcctggtagccatgtgcagcagtcttaaggagtgctttgtgattattggtttattttagaacaagggaagtgggattatagagttgtactgacctcagatcatccggtgccttttggaggaagattggcccataatgtttacctgcttccttctctttagtcctatgcgagatccaccgctgtcatgtccatggttggctacataattggtcttggagacagacatctggataatgtcctcatagatatgacaactggagaagtagttcacatagattacaatgtttgctttgaaaaaggtaagatgaaatgggcttcttcatttatttgaaggtcaggttatttggtgttaagggcaaaagtaaaatgatttgtctttttaaggtaaaagccttagagttcccgagaaagtgccttttcgaatgacacaaaacattgaaacagcactgggtgtaactggagtagaaggtgtttttaggctttcctgtgagcaggtatgcctttcctcttttgtcctgtagtgtaactgtataatgagcaaaatccatgggaggaagtcataaaacattttcatatggaaacttgtgttgagtttactgaaaacacttctaaaaataggttctccacatcatgcggcgaggccgagagactctgctgacactcttggaggcttttgtgtatgaccccctggtggactggacagctggtggtgaggctgggtttgcaggtgctgtctatggtggaggtggccagcaggctgagagcaagcagagtaagcgagagatggaacgtgagattacccgcagcctcttttcttccagagttgctgagattaaggtgaagcccaaagatgttatgtcactcactgtccgctttttaacatagcagatgtacctaagggttgatttatgttagggttttctgggtgtgaggactccttgtcatctctattagactgtcctcccacacagacacattcacattccttagagctattccaatgaacatatcaagtgtctaatgcaataattgaataaccttttcccctgttcagtagtcagagatctcaggcttattttctgtggcccgtgaatctgttcacttaatggcggtgtaaatgtgaatgtattgattatcaaaggtagagcaagaaaccactatcttagttgggattttagttaaagcagcacacccagatgttcctgtactcactgttcctgatcacaacctcccccaggtgaactggtttaagaaccgggatgagatgctggttgtgcttcccaagctggacagcagcttagatgaatacctaagcctgcaggagcagctcacagatgttgaaaaactgcagggcaaactgctggaagaaatagaatttctagaaggagctgaaggagtggaccatccatctcatactctgcaacacaggttgaaaataataattgatttgtgcttctggacatgtgctgttacaagagaaattttgtattcgtgtaaacactgtcagcttgaaatagaatttttagcaactttttaaaaatttatttccccccccccccaaagacagggtttctctgtatagccctggctgtcctggaactcactctgtagaacaggctggccttaaactcagaaatttgcctgcttctgcctcccaagtgctggggttaaaggcatgcaccaccactgctcagtgaattttcatcaacttagtataaattctgttaatggccatgaattcaaagtgcagatactcagctgtttacttatatttttttactttattgtagttaattctgtgacaaattattggatgggactgtatatatagtgagtaattagaacacttagatttagaaaacctaaggcttggttttctctctgctgtgtgtgatgagtcctttattcatttgggcagtggcagttatctgctttcttgactttaaaaataaagcatgcgggaggcagaggcaggtggatttctgagttcaaggccagcctggtctacaaagtgagttccaggacagccagggctacacagagaaaccctgtcttgaaacannnnnnnnnnnnnnnnnnnnnnnnnnnnnnnnntgctctagtcctctcccttccctgggctcctgcacataaactccatgtagtcatacatagacataataaaagtaataagtaaataaaccttttaaaagcatataacacacagaaggtaacaagttatcgaatatgtgtgtctaccgttgctagaggcttttagtctataaaaattcagcaattttccttcaagaaatctcagactcagttagcgcttatttaaaatgtgagcatagttaaggaaattgcaagttggaacaaaccagaacaaggagacatttgaacagtgtccttgagatttaaaaggagctaactaatctaaatatttacagtgtcataccttaactagatagaagaaaaagctgcaaatggcctttgactttggtttcctggttaggtattctgagcatactcaactacagacccagcaaagagctgttcaggaagcaatccaagtgaagctgaatgagtttgaacagtggataacacattatcaggctgcattcaataacttagaagcaactcagcttgcaagtttgcttcaagagataagcacacaaatggaccttggtatgtgagcacgtggattctgtcattgtatgtttgagaggatgggggtctaatttttgagccttaaaattgagtctgctatcaatgattactgacttgaaatggtttcgctgtgactgtctttaggtcccccaagctatgtaccagcaacagcctttctacagaatgctgggcaagcacacctcatcagccagtgtgagcagctagagggggaagttggcgctctgctgcagcagaggcgttctgtgctccgtggctgtctggaacagctgcatcactatgcaacagttgctctgcagtatccaaaagccatatttcagaaacatcgaattgaacagtggaaggcctggatggaagagctcatctgcaacaccacagtagagcgctgtcaagaactctataggaagtaagttgaaggcatctcattgcctacatttaacaccgagggaagcagggctgtgttgtaagttgctgtcttactagttagagcttctttctgttgctgtgataaagaccataaccaaagcaacttggggaggaagtagttttttatatcttaccatgtatagtccagcatgaaggaaacaggggaggaactcaaggcaggaagcctagaggcagaacctgatgcagaaactatgtagtaagtagtcttcctcccttgcttctcagcctgctttttcatacaactcatccacctgtgctttcccacattaatcatttatcaagaaaatactctccagacatctttacaggcaggcaatctggtgggggcattttctcagttaaaattcttcccaaatatgttgaggtttgtgtcaagtagacaaaacgaaccagcacagttgcatttgtattttatttttctgaaaaaaatggttaacagatgaaatttcagtgaagtaccttttgggtgggtttttatttttttttattttttttgtcattttttttttttttaatacaatgtgggaaagcaccagggtttggcaaggatgagtgtggatcctccaaacacgggaaaagtttttcaaatcctctccttgcagtatcaatgaccagggcacctgcagcccacaatcactttcaaatacagggggtcatttgttttttaatgcttttgggaaagtccgtcctatgttacctttccaagtagctgagattacagaattgtgctatcaacaccagatatcttggtgcataagagggtgcttattgcaagtttgaagccagcctcttcctgactcaaactcctcagggcttgcgtttgatccagtgctagatatgtggaatatctacgtttgcaacgttatggactccattcctgcagtactgcagagggagaaagaggatattaatgtgagctcattcagggtttctcttgcaagataaatcgtttctcctaattagtagatgaaaatgttcacatggtaggattgttccaggaagttattaagtcattgtatcactcaataagctatcttatgaaatagcttgtgttcttgagactttttgactttcttgagacttttttgagagtagaatgcaattttctcattttgcagtgtgaatgttatttgtatacaggggtgtattaatataagcaagcacctgctttatttttataggtatgaaatgcagtatgctcctcagccacctccaacagtgtgtcagttcattactgctactgaaatgacccttcagcggtatgcagcagacataaacagcagacttattagacaagtggaacgtttgaaacaagaagctgtcactgtgccagtttgtgaagatcagttgaaagaaattgagcgttgcattaaagtttttcttcatgagaatggagaagaaggctctctgagtctagcaagtgtcattatttctgccctttgtactcttacaaggtgagctagtgcttcatactagatcatcttactgtcttcatatgttttattttaatcccagatttaaaacactattatacttggccagtgtttgtcactttgagatttgaagtcttctctagtctatatgcactcaatcaaatttgttttcattgtctacgtaggcgtaaccttatgatggaaggtgcagcttcaagtgctggagagcagctggttgatctgacatccagagatggagcctggtttctagaggagctgtgtagtatgagtggaaatgtcacctgcttggtgcagttactgaagcagtgccacctggtaccacaggacttggatattcccaacccagtggaagcatctgaggctgttcatttagccaatggagtatatacatctctgcaggtgaacacttttaagtttggttgggaatatagttcagttggtaaagtgcttggctagcatgcataaagccctaactaagtttgatcctgagagacgcaaagtcaagagtagtgtcacaagcctgtaatactggtatttgggcagtagagccaggaagatcagaattcaaggtcagcctcagctgtgagactcagtcttaaaacaacaaacagcccagcggcaaaacagattatcaggcaatgggggttcccactttttggccccaaattttttataggtcaaggttagatattaaacagtcttgcttaggttcttaattcaaagagcagtttgactgttgaatgttacttaagcaattatttaaaatgttgctatggctacatgtgtgtgcataaagcagggattgatatgaagtttgtaattaatttgactgttgactgttgcttaagcagttatgtaaaataaggatcaggggctagacagttggcttacttgatatgagcacttgttgcaaaagacctggttcaattctcagcactcacatgaagaaggttcatctcctcttcaggcaccagcatgtatataatgtagcagtgagtttaggctataccactttggatcccttcgcattgtacatgtgcactcacccaggagctatctttggatctgcaatgacaagacagacagacagacagacacacacacacacacacacacacacacacacacacacacacatataccccagttaattttaaaatgtcttggctacctcaaaggctgggcactcctaaaccttttcctgctaccctagacccaattggggaagtgccagtggccacttacctgaattcttacatgacttattggtcttatctcctgaggctcctatgtccatctgcatcccatggctttgtggtaacctttttcctccctgagtcctagtggctgctggcatctttattgattgatcataaaccagttcgggacaaaggannnnnnnnnnnnnnnnnnnntgatcataaaccagttcgggacaaaggacctttaacatttggatacacagattcctgattgaatcaaagcattagaaccaatctctaattggttctaattaatttctgtccaaattaggaaaaacacccaaaactcttctctcagacataaattgaatataacataccaattatgtaaatcataagggtatgatacacagttaatgtccagtctatcatgtttgtcagttacatagagtactctaccatcattcctaatttaaagcatttatgattctatacctgaattatgttttgattttttagccatttcagaaccatgttttcaactctatatcacatctctcaatgctaaacaacctaagtttatgagactataactagtcttcaaccccatcagaaatctaaaaacaaattattacctgagtatttaagaagcactagacatagcctctaaaacagttgtagagacagctgactacctggacagcccctattccttataatgttgcagctactgtctttagccttctggccttgaaccatctgatagactttgaaatggagcaggaactataaagggctagtttgttctgtcttggcagaactaaactgtcaactctctcacattatgtgtgctttcatgagcactatttttttttttttttttttttttttggtctgtagatggatagagcagtttttgccatgtggcttggctaccttcttaccttaccttaccttgataagcaacatcacctggaggtaaagatgttcaatttttctttgaaggagaatgggaagcgtcaggagcagacatgtcttgtcaaatgacctttaataatgaaagcatattaaatgtcatattttgtggatttctgatggttttgaagactacataagatatatttgaactgttacaccttagatactcttagccatttctatttgagtaaattgaaagcattttattataattaaattagaatctaaccagatagtttactatctgacccttgtgttacttaatcctcttaaatagtttgtaatagcagctattagaaggactgggtcaaaaccttgtattcttgaatgagtgtcatagggcacaatgaatatctgagagtattaattttaatttaaaatttggtatcaatagacagatttataccaataagattatggctacacaatattttgttcaagaataaaatttagtaatctattccatctgtttcttttctgttcaaaattatgaccatttccaagttagccctaaaaatgacaaccaatctataatttataatataaccataaccagacacccaaacccagggaattggactgacatctctccatggcttcttccttttggagattggtttaatgttttgattcacttgggaatctgtgtgtctaactaaatactaaagatccttgtccctaattgggttttgatcgatcaagaaagatgccagtggctaataactgggcaaagagagatggagcaggaccctagagttgtgtgggctaggatgcacggggaggagggcaaggaggaggaagaaagattgccatgaagcagtgggacaggagataatgctaatgagccatgtaagaatttgggaaagtggccactggcccattgggcctttgttagtatgggaaggtttaggagtacctagcctttgagatagctaagacattttaaaataactggtatgtgtgcatgtgtatattcatgttcagtgagccaaagcggtatagcttaagctctccactactgtagtgcatacacgaaccaaaatactcatacacatgaaataataaaaataaaaatctaaggatcagagtgtggctttgtgtaggttggcttttgttgttgttgttgtgtgtggtttgttctttctctgtctctgtctctgactctgtctgtctgtctcaaatagggtcttattatgcagctctggctggggcctagatctcaccatgtggtccatgctagcctctaattcctgcttctgcctcctagtcccaagggctaggattaaaggtctaccatcatacccagcctagttttgtttttacattttgggctttttggacacagcatctctttttgtagccttgactaaggtggaattttccatgtgatataggctactatcaaatttatggcaaccctcaaacttgaagagctccctcaggctctgcttcctgagaagccaccattacaggcttgtgccaccatgccctgcatgacctgggtttcagttctgggactgcattatgaaatgtataacacttagcaaaagcattaaaatatatattcttctttttgtaggaattaaattcaaatttccggcaaatcatattcccagaagcacttagatgtttaatgaagggggagtgcaccttagaaagtatgctccatgaactagatagtctgatcgagcagactactgatggagttcctctgcagactctggttgagtcacttcaagcctacttgcgaaacacagccatgggacttgaagaagaaactcatgctcattatattgatgttgccaggtaatgtgttaaccagctatgttctgtttcagcaaaagagagatggcaaatcagcaatagtgacacatgcctgaaataccagggctttggagactaagggaagaacatggttcatttgagccatcctctcacaaaaagagaggtggtaggaattaggagataatcaggtaatgagattctgagctctaacctaattaactttatttttaatttttgggacaaatctgattacagatgaatgtttatgatataaaaacaacaatacaagtccattactttatgatcagctttactacagattgtctacagtcctgtgcaagctcatctttagtctgaccttagtgcatgctttcttcacaataacagtgtcatgaaatgggcggtgggaaagtcatggaatgtgcttgtatttcactagtaacactctttgagtgtctgtgccctttagtagtttatgcagctctttgttgtacacacaactaccctattgttgccatggctacctgtgtgtacataaagttcaatgtgtgtatatggggggattattttttgtgagaggtgggggagtgtcacacttgatggggaggccgaagtcacttgccaccgtgcatatgtggaagtcagataacagctttatagtcagttctgtgcttccatcttttttttgtttgtttgtttgcttttttgtttgtttgtttgtttttgagacagagtttctctgtatagccctggctgtcctggaactcattctgtagaccaggctggccttgaactcagaaatccacctgcctctgcctcccgagtgctgggattaaaggcgtgcgccaccactgccctgccattgtattcttctttaatcctgagaagcaatttgactttggaaacttttgggattgcatagctctgcaaacatacattatagctatgctgagcccttagagactcaggatcatttcctttgtcattctggtatataagtttagtgcagaaaacataactaaggggacagaaatactgccctcctggtttcctcacatggaaaattgcaagtagagaggagggagggagaggaggacttgtttccacatgggaagtcatctgcacaagctcattctggtttatgttctgttccttgttaattttgttagatgctgctgtggagggtgtacatgctagtgtgcacatacagaggccagagaattgctttgtggagtccttgtgtccacctatattagggttgtggattcaactcgtgtcatcaggcttccatactctgatagtaactgctttagccattgtgccattttaacagccttcccttagttattttgaagtagatttttttttcttaaataattcaagaaacacaatatgcatataaacttttgttgttccttcaacaaaaaggtagcaataattccttcctgaaatcagtgctgcctttaggaatcctctgttctttcctttttagctgtagttgtgtaatagtgtaactaacaatgtagacatgtttcagctaaatgtggcttaaactatttatgtaatagcaatatcatcatttcaaggaacggttacaagttaggttaaagctgtgtatgatttactgaatttcagacctctccttgatgtgtaggtgtgggtgcaggtacatgtgctcatgtatgtccatcagaagttgatgtcaagtgttctcctctcttgctctgcccttttttttttttttttttttttaataaattataagagtctctcattgagcctaggactctctgattgcctgattcccctgtcttagctttccattcctggggtcagaggcagatggcttcatgccttgccattgatgaaagttgtcatctgacatgttctaaatcacacaatatttttattattttaagttttgaagtgtacataatccaaaactgtatatactacaaatggcaggtacttccattactgactaaagtttgttccagttacattgctgtagcaccattgcacctgacagttgtacagatctacattttggaattaggttattaggttattcttgatgttcttatatattatatagtaatttctaaaatgtccttcacgtttacataaaattgaaatcacataaataggtattacacataaccaaaactgagctggactcattgatttcatgatagaattgtcactaataccattttctcatagaagttagcataatggtagcatgtttctatagactttgcatagatgtctcttaagactcagacttttgtattccccaaacaaactctccttcaggtgagggttttaacaccagtttctttttctctagaatgctacatgctcaatatggtgaattaatccaaccaagaaatggttcagttgatgaaacaccaaaaatgtcagctggccagatgcttttggtagcatttgatggcatgtttgcccaagttgaaactgcttttggcttattagttgagaaggtaaacattaactttgctttatgtaaggtgtgagtgcaatagtcattgaatgtgaacagaggaaagtgagcattcctttttccatttgcatagctaaacaagatggaaattcctgttgcttggcggaagattgacattattcgggaagccaggagtacccaggtcaatttttttgatgatgacaatcaccggcaggtgctagaagagattttctttttaaaaagactacagacaattaaggagttcttcaggctctgtggtaccttttctaaaacattgtcaggtaatactagcattccggcttaggttgcctccatagtactatagaaggaatcatttggagtatgcttcatttaactgtgcacttgtgaattctttttttttcttatatgatcttatttcttcaggacccattttaagataattttcattttctttctatttttttaggatcaagttcacttgaagatcagaatactgtgaatggacctgttcagattgtcaatgtgaaaaccctttttagaaattcttgctttagtgaagaccaaatggccaagcctatcaaggcctttacagctgactttgtaagacagctcttgataggactcccaaaccaagccctcggactcacattgtgtagctttatcagtgccctgggtgttgacatcattgctcaggtagaggcaaaggactttggtgctgaaagcaaagtttctgtagatgatctgtgtaagaaagctgtggagcacaatatccaggtagggaaattctcacagttggtgatgaacagagctacagtgttagccagctcctatgatacagcatggaagaagcatgacctggtgcgcaggctggaaaccagcatttcttcctgcaagacaagcctgcagcgggtgcaactgcacattgccatgttccaggtaagcaatttgctgtgtaattttccttacagttcgtgtatgagagtatagagaaaatatgtaaagtacctcagctgtgccaaaccaaagtgaacactgttaagggttttttgttttctttgcaattactttttttttgttttgttttttgtttttgcttcttgttttcagtggaatggagttggtttcatgtttaatgtcctttgactttcttttcagcaggactgcatgataagcattttatatatttatgtattaatgaacagtgagtattgtttgtgaatgtagtttataatggttgtatttattcatggtgtaggtaggtctgcatcctgtattgttgagtttgtaattaaatttatctcaaaataggtttcactgatgctctaaaaatacagtgcatagctttgggtctaagtaaatctgcctttattttgaaaagtgtgtttggaagaagcctcttttgtcaaagcacaggctttgggataagatagatgtgtattacagccaaacctagttccggcaccctgcctgtaggttgagggcggaatcccttatggaggatgacttgtgagggttaggcaacaatctgtgaagatggtaagaatgttgtaatggaacgttgtagcttaggaatggctttcttatttattcttttataaatgttggctttgacattatcaaaagaatgccagttttcttgaatctgttttggcatagacacggttattttgttttacttttgtcagtgatcagaaggaactatgtttcagaggatctattggcagtttcatcattgctagctattttcctacttcataagttaggaagagaagtacgttcaccctgaatcacattggctgtgtattaatagtcctgcttcttgcacattgtctatggattggggtaatgctttatgacttctttctttgaaatgctaaacattttggattttattcccgtagaaatgatcagtgttggggctgaggatgtagcgtacttatagttggtaatgcatgctcaaggcccaggacacccaggagtgcacagactgaactgcgctatatacttgtttggctgaaggatcagaagttcaagcttatcctccgctatatggcagggttaagatcagtctggctacatgagacttggtctaaaaccttgtctaaaataatagtaagaatagttaatgaaaaacaaacaccagacatttaaaagtgagagttaatgttgagggaaacttgtttaaatatgggcacactttaaaattttaagcataatatataactactggattatttagctggtgctagaaattatgatttctacacgttatgtcaggcacatcactaaactaccctagctcctatagaagttgttgtcccaatgacccttgtaacattaaaaggaaaatgttttaatagtgtgtcagagtttttctgtgctattatttctttcagtctctatctagtctccttgctagactccaatacaagttcactgcatcttcttatctagaggtcctcacacacacacacacatcaccaagataagggattgttgttgttttgaaatgaagctcaaactgacctggaagttgttaatcctcttttctccagctcacaagtactgggattacaagtttttttccacccgacctagaaaggtcagtttttgggattaggtgcgccaaatgtacttaccagatgtcttaagaattcctatttgaatcccatacattagtgatctgtgatgtttaacagctatctttcatgtcagagaagttgtcagttagatgtgatatttcttttattctccccaactaattgcccccttattgcaactcaattttctcccagtctcacctcatgtggctctttccttatttatccgaagttttattctaatgggtctacattcttctttttctttgaatagtggcagcatgaagacctccttatcagcagaccacaagccatgtcagtcaccccgcctcggtctgcaatcctgaccagcatgaagaagaaactgcatgctctcagtcagattgagacttcaattgggacggttcaggtgtgtctgactgtcctcctaccagcacattctgttatacaagtgtaacttagcatatctgtgcctatcttcagcttctaagccaaataaatataacttaagtccttttcatacagtatattctgatcacagttttctccctcatttcttctcagagtctttccacctcccctcccatacaacactatgcctttctctcttaagaaaacagacatgtgtttttgttgtgttttgttttgtttgttgtgtccttttccaaggccaagggctagtaactatttatctggcatgtctgtcttgtagataaaggattaaatctgtccagtggagcagagcatggttctaagtgatggttgactgtatgcatcatctctctgtgaaagctaaatatttagttaatatttttaaaaaagaaatttgtcttaaagctatatatttgtgtgtatccttcatttctgagatatttggtggcattcttttctgattatataatttaataatatgaaattcagtactaacatagtattttaaaatttgaagtgaaactttctgatattcgttctttcaagttatccagaagtccgccacctgggcatgtcctcaaccatgttttctttccttcctttcctttaattttaaacctttatttttcttgtggtgaggattgaacctagagtctcatgtttcctaggcacgagttctacctctcacatatatctccagcactgttctctctcctctcttctcccccctccccttttttaaagagacgacaggttgacaggttcttaccctgtagcctaggctggcttggacccggcaatcagcattcccagtgctgaggttacgagattacaagtgtaccatcaccattcagagtctgtatttaatttttaaaaaaaaaatgctttatggggctggagagatggataagtggttaagagcactgactgctcttccagaggtcctcagttcagttctcagcaagtacatggtggctcacaaacatctgtaataggatctgatgcccttttctggtgcgtctgaagagagcgactgtgttctcaaatacataaaataagtaaataaatcttttaaaaagatatttaaagaaaaaagaatcacaaacactgcaaaaaaattaagcaaaccccaaagaacacaaaagaacacagattttaagtaagtcaaaagttattttcttacccagccatccttggcccttaagtactcaaaatcaagactaactctgaaacaaaggtattagatatgttttctaaattaaacatgcccacccgtactactgctgaatccgaccataaaatgttcaacaagtaggaagtgatgagagtggtaaaggctcagggtttcttctggcttttataggagaaactagcagcccttgaagcaagcattgagcagcggctgaagtgggcaggtggtgccaatcctgccctggcaccagtactacaagattttgaagcaacaatagctgaaagaagaaatcttgttctcaaagagagccagagagcaaaccaggtatggctcattcctctcaggcttctagttcaagacatttgagctttgtcttcaggtacttttagctgtctcagatcttgtaaatactgacaaaaattaaaatgtgctactcaaagcctttggaagtaagttctcaggacctctaatccagattctagaaatgtgccatgagtgctgtttttcacatcatcattttttccaccccaatgtgggttctctcttcttcacaggtcacttttctctgcagcaatatcattcattttgaaagtctacgaacaagaactgccgaagccttaagcctggatgctgccttatttgaactaatcaaacggtgtcagcagatgtgttcatttgcgtcacagttcaacagttcagtttccgagttagagcttcgtttattacagagagtggtgagtcctatgggagaaactaaccgctagtgtctgaaatgaaaaggccaggaacctaaattaaggttatggttattggagactgagtatatgtaacaaattgttacaggaatgcagtgatgattaaatcttgcttttaggatccatggaacttgactgttcaataatatgttgaatgaaaaagatattgtggcttatgtgaaagttctgaagggggcaaaatgtgtatagtattgcgttcagtgtgccaagagagtaggacagccaactgggaatggctgctggaaaggtgagctaataagcctgaacgttccaagttagtgagctcagtgtttgaatgctatgggaaggatttatctaggctgttttaggaagttttgtcttaattttaaagagttatttaggttaagtttagagactttgttatagataattgtcatttcaactctattactgtctttcaatcatatatttaaagcatttatatcctgtatgatacgctgaaaaattaaaattcttctacagacttgcaattgttaagtgttgtcttctaagtatcatcaaatcaagagccaacaactgagagtttgtatctcttgctgatggttataggatttatttattccaagtgaattaatgcttattttatttaggacactactcttgaacatcctattggcagttctgagtggcttctatcagcacataaacaattgacccaggatatgtccacccaaagggctgttcaaacagagaaggagcagcagatagagactgtctgtgagaccatccagagcctagtcgacagtgtaaagactgtgctcaccggtcacaaccggcagcttggagatgtgaagcatctcttgaaagccatggctaaggtaatgaatcccactggcttagtttcctgtctcaagataaaactttgtggaaagatatgatattatataaacaaaaataacttctgaatttatgttttgcaacttgtttgtaactgcatcaaaatctattgttttcatcaattatgctttaaagcaggcattctgatttttgtatagaaagaatctgaggcttaaattggttaatttagtgtcattaagtgggcattttggttttcagtcttttcttctctacctgtatttccaaacataatagcttgcctccaaagtgaatgaactatgtatggtctcttgcctccagtaccctactcagtgggctacaacagtcattttggtatttctttttgtttgacataaataaagatgctagaaacaaagattctataataaaactgatctataagcagatcaaacacagtgacatttagatcacttactagcttttaatcaaggggtaactgtcttgaaaggagttgctgaacaaatgagtctgtttctaatgatttatgtatgctttggcggcaggatgaagaggctgctctagcagatgctgaagatattccctatgagagcagtgtcaggcagttcctggctgaatacaaatcatggcaagacaacattcagacggttttgttcacactagtccaggccatgggtcaggttcgaagtcaagaacatgttgaaatgctgcaggaaatcactcccaccttgaaagaattgaagacacaaagccagaggtaagggtgctccctggccagctctaatgaaatagaagcaaagcctgagaagtgtagctcctgtcatttttatttctagttttgttcatatgtttgtaaacagttctatggcaaaacattccataaataaatatttcataaattttgtatttcagtatctataataatttagtgagttttgcatcacccctagtcaccgatgcagcaaatgaatgttcaagtccaacatcatctgcaacttaccagccatcctttgctgcaggtatgaaagatgtgtttatacatacaggtttaggtgtttagctatgggtgaaggtttattgtatttgtagtcaccgccttagagttttctttaacactgccacatactggttcaatggattttagaattaacaaaaatttcccataactttagctcctaaggatctgatgcctactttgccctcttcctgtgtgctacacacacaaggagtgtggggggtaataatggcatcaaatctgttgaggtttaatattgttttttatttaaaaatgaatagattgatttccttcataaagaataactaagtcaaacatattggtgcatacctatacttgggaggccaaagcaggnnnnnnnnnnnnnnnnnnnnnnnnnnnnnnnnnnnnnnnnnnnnnnnnnnnnnnnnnnnnnnnnnnnnnnnnnnnnnnnnnnnnnnnnnnnnnnnnnnnnnnnnnnnnnnnnnnnnnnnnnnnnnnnnnnnnnnnnnnnnnnnnnnnnnnnnnnnnnnnnnnnnnnnnnnnnnnnnnnnnnnnnnnnnnnnnnnnnnnnnnnnnnnnnnnnnnnnnnnnnnnnnnnnnnnnnnnnnnnnnnnnnnnnnnnnnnnnnnnnnnnnnnnnnnnnnnnnnnnnnnnnnnnnnnnnnnnnnnnnnnnnnnnnnnnnnnnnnnnnnnnnnnnnnnnnnnnnnnnnnnnnnnnnnnnnnnnnnnnnnnnnnnnnnnnnnnnnnnnnnnnnnnnnnnnnnnnnnnnnnnnnnnnnnnnnnnnnnnnctgtcctggcactcactatgtagacccaagctatccttgaactcagagatccacctgcctaccaagtgctgggatggaaggcgtgcgccacatgcccagcttctgactgtttattatgatttagaattttattcttagcttagccgggcgtggtggtgcacacctttaatcccagcactcggtaggcagaggcaggcagatttctgagttccaggccagcctggtctacaaagtgagttccaggacagccagggctatacagagaaaccctgtctcgaaaaacaaaacaaaaaaaaaattttttttttttatccttgttgagacctttagagtactatattaataggagaaagggatttttggagtcttctgtccaaaataagacaggaaaactactgtgcatatctgtagggtcttttaaaaattaaaaaaaaaaaaatgttagcacatagacatcagcatcattttccttttttacagttaatattgataattgcttgatgtaaagtttatacatgccccaaaagtatgtggttctgtgctgatacttatttttaaaggatagcatttcactgccaaaccttggttggcctagaacacctagtttcctgcttctgtctccagggagctggatgcaaggtgtggccatcagttcattttttctttcctgtgttcttgctgctattcctttcttcctccagtgtattttgggcatgttttttcccttaccctcaactccttgcagatttcctcctgccctaccctaatttcataattttttctttaaaaataaaaatcatcaaaaacaaaagcacacacacaaaatctgaaacaaagaaaaaatatgagttctattgcatcagccctgttgtgtctggaacatgctatttcctttgaagccatccactatctttggcttttataatctttccgcagcctcttctgcatagatccctgggtcttgaagggagggctgtgatacatttagggtcaaatactctaggtttctcactctctgatgttgtccagttgtaaatcttggcgttaattagacatttacttcaagaagaagcttgcctgataggttgagtaacgcactgatctgagacccagttatatgtggtggctatgatattgccagggagctgctgaagaattgagattggttgggaggaatggtttaggaaggtggtgaagaagccccccagccccattaagattttaaaatttaatgtatgaatgttttgcttgtattgtgcaccaatacgtgctgccttgtgtccccagagatcagaagatggtcttggtcagatattctagatttccatttaccagtgattgaaagccaccatgtggatattgataattgaaccagaacccctcttagaacaggaagtactcttaaactgctaagctgtgtctcccaatttttaaggaatatgtttttgtagtgggttgggcggctgggggagataatatgagggttggggtttgtgtgttccagaggtaaccttggatgccattcacctttggtgggtgtgggtgtgagtgtgagctcattctgtagaggttggcctcaaactcaagatccttctgcctcctgagttcttggattaaaggcatgaaccaccactgtggaatatggacttttaacataaaatcaagttcattttcaaagttgagtaatgtgcaataagtcctatcagccattccttgtatgtgtgctgccccccccctcacgtgcccccagtctacccccagcttctgtttgtatgcaaattgagccaccaatcttttactttagcggttaggagtaacactggccagaagactcagcctgatgtcatgtctcagaatgctaaaaagctgattcagaaaaatctggctacatcagcagatactccaccaagcaccatcccaggaactggcaagagcatcgcctgtagtcctaaaaaggctgtcagagaccctaagactgggaaaggtaatcagccagaatgtggatgccttgtaattctataatacacacaagttggtttgacttacatgtgccattgcttcatagctgtgcaagagagaaactcctatgcagtgagtgtgtggaagagagtgaaagccaagctagagggccgagatgttgatccaaacaggaggatgtcagttgctgagcaggtgactattttttaagcttaagctatgcattaatgctgctggtaggctcaaggatctcatttacccatttccttattttatcaagaaataatagctcttggcctagcagaatggttcagtggacaagggcgtatgcatatgcttcagagcctgacagcctaagttcagtctctggtttcacatggtagaatagaggttgccaactcattcacgttgtcctctcacttcatatgtgtgcctgtgcacactcacacacttaagtttaatgataaaaagaaatcagcccctgaaacctacatccaggactcggaaggctattggcaacactgctctaaagttgtcagatgctcactacttgactcgtcactacttagtctttcctcttaggcaatctcctgcatagtcgtttaagctatatgactgctctaatcatcctccacactcaggctaacactcggcttaccgttctgaaagtatcagatgaagggagggtgacaatttttgaaggtgtaggctctttagttccatgaatacctgtgtgtttttgtccaaagttttcttctgttaatgaatctgtaccacaccccatcaccccagggtgctggagattgaccgttggtccttacaggtgctaggcagatactttactgctgagccattcaactgttagttgtttattttgaaaaatgtttaaaagttacagaaaagttgtagagatgccatactttttacctagactaatcacttcttacccacatttgcatcatttattttgttctaagcagaacctttcatggtattaccacccctgggtgggggtgggggtgggggtggagaggttcttaccattcctaaaggtctaaggaactttcctaagatcactgagcttgttgcattctctgtggtcatgaagagtgctacatctttctaccagagtgtaacctctcctcctttgggtgagtcatttgactagaaacttgctcttgagacaactcatgcaattgatatatgaaatgtgtcctttctggttcttagtgattttcaattctgtcctgcctatgttcacaggttgactatgtcattaaggaagcaactaatctagataacttggctcagctgtatgaaggttggacagcttgggtgtgaatggcaagacagtagatgagtctggttaagcgaggtcagacatccaccagaatcaactcagcctcaggcatccaaagccacatcacagtcggtggtgatgcatctgggggcttactctgaggaaacctaggaaatctcggtgtactaggaagtgaatcctgcaggacagctgcactcagggatacgcccaacaccatggccagggtcaaaggtgaagaaagcaagctcactgcctgcacacggagattgtctttctgccacagaacagctgcaaacgtgtcaggaggttagctgagaaagaaatcgggctgctgcggagcacagagtgacttggaactccattccacctgaccctgtgtgtacaatccaggaaaacaaaccccgctcagaaacaagagaaaattggggccgcgaagaactcacagccacggaagagttgttgcattcagattcttgagaaacatttgttgctcggcaacagtactggttgggttgaccagttaagtaccaaaaggctatgctgtatgaatttcagaaatggactgaaaaaatggagagcagtgtaatagacacacactacatcggaagaactgacttctgaaacgaagagaaaagcacctatggatcccactccttcccatcgcttacctgttccccagctccccgttgacccaccctggtagattagccagctgtcagactcacttttatttcaatccttacacttcataaacttttgtctccacgttgttaccatatttggagacagaaacaggagtttctccaaatccaatgaaaacatggaaaattcaaggattgtttaaaggtctgtgatcatcacatacaagatgtaactctggttatttcagtcatatctgtgactctatcatgtacagtttcctgaattgtcactgtgcatccaaacgtaatgagtctaacagacactgatttcatgtgcactcccctctgcttacaatgtgcattttttggaggtcattcaaattttccctcttctgtgattgctgtagtttctttcatagaaagtagctgatctgatgtaatcttttaccttttaaacaaccaggatagagaacctattggagtttgcattgttgatgacaggttcacaataaagtgacgttctggtggaggtagagtgaaatgttttttaattcagttttctcatttgatacttttaatttacaaagtaattttgttttatgttttaaagtgtaaattaaaaatgctttagtttacctggcatttgggtatgctcagtaatgcctgccagcagcacctttaatttcagctggtggcctgtgatgggttctgtttaccttttgcaacattttatagcttgtttagtgactagtgtgtagtgagtcacgatcaaggcatccttcagcttagcattttcagtactcactgctgatccttggtagaagtgcagactagaatagagctaaaaatcacgtatcaacacagaatagcacatggtattttgagtctttttatccccccccccccccctgcattttagcaactagtgtggcggccacttaatttgccagcctctccaagcctgaaaaggtccaggtgtctaagctcttctctgactgcaacgagttgaattctaatcctcacaggatggatgccagtgtcggcactttcttaattatgagtattgaaaggtgctgttttcagtctccacatgtctgctgacaagttaaagaatctagcatatcgcatttggttttacttgttgattttgagccttattgtcacaaaacagcctagctggaatattgatgccatactatattttgcatgctattttcttccctagaggcattgagggcaattgcactttggctctctcaagatgtgtcattttcagacattcttcatgtcagaagagcttttgttgtaaggagaaaaccagctcagacttttgtccctgtaggtgatggtagtggtcagaaatggcttttgctttggtaataagtgaattttattccccaagagtctcaggcatcagaagtacttggcatcttaatccaagcaaaaataagacagcttaaaaaacaaccaaaaaaaatgtgcctctggtgaattatccatcctttttttaaaatgttaaactggtctttgagaaaagaatagtgcagataagagcagccaaggacttcaaagcttgttgatcactgcactctggataaaacccttggcttcctgttcaaatagcctttccaggtttaacttctttaaggagcctcaagtgaaaaaaacaaaaacaaaacaaaaaacccagggccactgggggaatgttttatgaaatcatgtagagtgctgtagttttgaagtcatccgttttttgatgacaaagtacctgtggaaaaccagggatatttttttttcctcaacttcttctctttactccctacccctctcctccctaattctgtcttccttctctccactcttttaagattcagagggtacagaacaacctctattatttcagagtacccttgagaattgaaatgtatttcgattagttgtctttaattagctagctagagtcagttgatatctctaccaagctgaagcctagtacctacgaagctatttctttaccaaagtctcttgcttctgcttatggtcgtgagctgatcacgcagtttgctagatgatttgacactggtggtgagttcttttgaggcgtgagatttctatgtgaaactgataggtcttgatctgctttcttagatcactgattcagagctcaaagcccaggttcagggtaagaatttgtaatacagaagaagaaagactcccttcactttgcccttaacacttgcctctgttatctaagcttcgttagtagatttcttaatatcatccaatgtttggtgttatctgcattgtttttttttttaaattgtggttgttctgatgtgtgaaatttaaggaaagagccatttaataaatgccaagcagggcaatgcagccaaatattagagttgatgtgcagtcttaggtcctttttaatctggggtattacaggcagtactttaaatcagagtcttcctggcctttttccctccacctttttgtagttactcgggggcttacttgtgcagtactaaaatcaaaggagctggttcttcttttctcccaatcttttcttagtaatgaacacacctacaactagcctgccactcccaatcacacacagcagatgtcagtgctgtgctaatattagctgcatttcctgcagggcagggatgcgaccttgcacatgctaggcaagctctctaccctgagctacgtacatcctagcccttagaactaccaccctgaagcatctttgtttcctgtgttcagacgcagacgaagaccaacattgttttatatgttgaatttataaaatgctagtaatttagaaccctccccccaaatcaaggaggcaaaaaataacgcactagtcactgaagttcatcctcagttacctcgatagggtaggtagattcctaatagtgctggtgagcatcacaatgctgtgcaaagattcaagaggaggcagtcactgtactttgcctgcttttgggcctagataacgtcactgtctacaaaaagctaactgcttaggtttgaaaaggcaaccatgtagagaaaacttgacaattggggctcattgggaagttctagtgctaatgttaaaaactcaaatcagctggctatttgaagatggcaaagaatatagttctgaaattttatttttccacaacagggtgattggcagtggttgttttccctttttctgacagtgtggttcagctcctgtttcagattctgtgtcatttttcaatttacaagtcacttaagtttctacctggaatgtcaggtggcaatgacatcacattttgtgttttttttttttttaaactcttatttaagagtaagttgagttgaactgaatcttccttgtcttagtaacattgtacaaatagtggcttatttttaagttgtaatgcctcctgatggatataattttgtgcttgtatttaagattaaaagttgaataaataacaccagcttcctgaaaatgtccataatgcatcatttgaaaaacaaaaacacctgcctactttacattaacatggtaaagattgtatgaaatacctgtttttcaaaaaaataaaaataaaggttcaagtcttaaaaagataacagtatctaagctctgaatttattgaagtagatcccagaaagtttgttttggaatagttttgtggctttttttttttcatattatctctccaaattaaaaaaatttcttaaaaaatgttttactcccttttgaacagcgagttaattatttcagtaggaaagttcttagataagaatcgacaccttcaatcccaggggaggcaaggataggtggaatttctaggcgaatctggtctataaagcaagtttcaggacagccaggattacacagaaaatgcatgaagcttaattttagcaatatttaaaacaaaactgcagagccttaattgtgagtgaaagctctgaaagaagaagagtatttgcaaagatcttcttcatttgcagtgccaaagttctgaggaagatttgtgttacgagcttcatcttctgacacatttcaaaggtcactttgtggtagaaaaagaggtgtttgtaacctctgagccatttggaaggttagtgagagctggattgggacctgggactggcctaaacttaaattttactttgggaacaccgactaaactaagctttctggggcagtagccaagttgccaaggaaaaacttattactctgccctctcttagcaaagtgactgctcctggtaccaccaagatgggcacctcattgcttggtagcagctgtttgggtccttttgttctcaatactgaggagaaggagggaattccaggctttacaatttttgacatgatttctgtatcaaccgaagtcataatatcccccccccgccccgcccacacacaatgagcgtccttcctggtcaaaactgttgtctgtaccttctagtactttccacaagttctatgacaaattgtatgcccctttgacagagccaccataggccaggaagggaccaggcatatttaggagcactatgtgatctctcacatttctctttaacctccaaggcctttaaagaacctggtaattaaggaacgaagtgtttttaaaaataatttaaaattagttgaaggtcgtatttagcctggcttccccatacatccattaatctatcagtctgaagccctccaacatccgaattgctcctctactcatccatccctccgaatgaagcgctcccctagctacctgaagtactcatagattatcaagtgaagcaccccgcaaatgattcccccaaaaactggctgcaaatgaagccctttaagagtttgtgcatcttccatgttctccaaaggccagagctggggagaaggcacagacagcgctcacttggggcagccaatacttcagtcagcaggtgccacagcaacctaaagcgtccttgcccttccagcctccgcataggatgccattgcgcatcccctgcgcagctgagcggacaggcgcctgagcggttttgatttccagcagaagagctagggactagagaggccccaggatttaggaagatctgggtgagagactaggtacggcggttgaaccgcttccttccgctccgcctctcgagggccacacccctgcactctgattggtcagagtctttcagtttcgctctcctttgacctggatttcaagtcatgcgctagctgccggttggcccgacttcccagaagccggagtgcggtctacccaatgaggagcgagtttcgcgagggctgtcgggaaaggcagctagcctatataagcagactgcggggcgttcccccgcgctcgggttgccttgctggtgttggggggatagtgtgtgttcgctcgttgataaccgcgagtctggaacgatggcggagggggataaccgcagcagcaacctgctggtgagttgcggtggtcagtctgtccccggagtttccggatgggcctcctggcctcggtggactaccagggacagccaggccttatctccacggtggaggtcgctgctggcgatccccaacgtcccccggaatcctgcaccataaggcttgggccgtgcgtgaggaagtgtgagaagggggctgtggcaagaaggaacctgggtaacaggttggggcactcggccgccaggggccttgtctagcgctccggctcaggccggagacctacctgttttgccctttgatcttaatctcatgttccgtagattatttttaatcatgattctttttctcctaaaacttggcgcaagggtggagggtcaaagggctgctacagagaattagtttatcgctgacacagaatttgttggagctggctggttggagttcaccgcaggaagctgaaaacgggttctgcggaaaggacagtgggggatcctggcacttgtctgggaactggcgagggactcacgggactggatgcaactttaaaaatgatttagcacggatttgacggagctacacgagatgatggtattagaagagggcgcgtttgcttcattacaggtctttgtttttggtttttaaggctaggttttcgtgtagcttgacgaggctagccttgtatttgtcatcctcctgtgctgggattacagttgcgcatcaccaggccctgctagtttcaaatttttaactgcatcacccacctaggcaagaacgaaagatcttttttttttttttttttttctgtattgtcattccccagaaaaggcaggccatatcagaaatgaaaaaagcaatcagcttttaatgcctgcctttttaactgctaagtgccgacaagattcttcgggacagttttgagtagtgcaagattttcagtttgtatttgtgtttagaggtgcattccctgtatccttaaattccctacacacacacacacacacagtaccctacaatagagatgcttaccctgtacccttaaacttctacacaataccagcaaacaattcaataagaggattaattgctgtacaaggaaactatcatgggagagggcctgatcactactatttccatcattttaaggagagcaagtccattagtcttggatttcctggatttaaatatattaacccctttatgtctcagtcgccttatcttaaagtagaggttgtgagaataccttttccagtttttttggagcgtcaattgaagtataacatgtaaaatgtttaggatttctagtatggggagatgtcaaaagtacttagtcacatatctcatctttattaaaattagcctgaactgttctatatttgcatattcctttgtgaagagttgatagtgtcagttgggcattgtgtgtatgtagttcctggatgttgaatccagagttctgcacaaacaggttctaaataccttccgttaccaaagtccctgataggttcaggtcacagtagcccatggtaaaggtgtgcttttggctagttgtcacatatgcagaaaaattttgagatttaattgaaattctatcattaatgatgaggagccattaagtgctgagctcacatagtttggttgaaagagttttctttaattccacagtgactgccaacatcagagtcattccattatacaaagctattttagagatttatgtacttagtgttaagggaaaggttctcctgatggatttagaaggacttcaatcaataaaatggccaatcgacagatcaatgccaaccacctgaaatgggcaaacagaatattcaatctagtaatattctgagcactgcctcttggctctgtggctgcatttggggatattagtttcccatattaagctcactttcatgaatattgaaataaattgtgaaatcttgggaatattattatacatcatggacatatggcccagtgctaaaatgaccattaaagcctaggctttttcctacccatggattttcatatttggtgccaaaattgcaggttttcatgactcaccttgtttaagataacagttttgtaaaaggcattttacgtgtttttgatgcctgagaaagtactctctgagccaccaaagtgttgagattggcaaagtaacagtcttaactgttgatcatgtgtaggccgtggagactgcaagtcttgaagagcagctgcaaggctggggagaggtgatgctgatggctgacaaagtccttcgatgggaaagagcctggtttccacctgccatcatgggtgtggtttccctgctgttcctgtaagtgagattctattgctaaatgctcagagggttcatagcctgtgcttagagaagcttttgtaatacataatccaaaaggaatgcctttattgcaagcagcttgccctctttctagatttgtagtccttatgtaaagttgtaacttgatgcagttgagtaaatcccggacacgcaaactcttgtgtttcagcactcttgctttattatattccttctagtaaattttgaggacccagctgggcgtggtggcgcacgcctttaatcccagcactggggaggcagaggcaggcagatttctgagttcgaggccagcctgggctgcagaatgagttccaggacagccagggctaactgagaaaccctgtctcgaaaaaacccccaggaaaaaaaatattgaggactccagaggttttgagtactgctgtttacattaaccgctatggctgtgacaacatcacgccatggtgcccctggaacgcctctgtgaggaagttagaaagggagcagccccggctctgagagtcgaggggagggagggagggaatagctctgactgggaatagtgactgacggctgctcttctctaaccttggttaattttctctgtttttaataggattatctattatctcgatccatctgtgctgtctggtgtttcctgctttgttatgtttttgtgcctggctgactaccttgttcccattctagcaccaagaatttttggctctaataaatggtaggtggctctgcatgataagtgtgctgtggttaaatgaagactcttgtctgcccgtcagatgtctgtctgctggagttagagtcattgctcttatgtgaagaatttcatacctgacttcagatgggtaccaggagttttcagtacttctatctctgtccttaactttggtcgaaaacttgcttttttgttgcttattcagttctatatctaccttaagtaagggtatttttttaaaggtgatgtttaagaattccaggactcttttgttgttgtttttgtttgtttgttttttattaaactatgtatgtttatttgggagtagagatcagagggcaactttccagagtttgttctcttaccatatgtgggtcttggggactgaactcaagtcagaagggtttgcagcctgcacctttgcctgacaaccctctcagtggaccttgagctcagttgtttaaatgcatctttttgatgtgtgtgagtccttgcttgtgtgtacacttgaggacaatctcaggtcaatcaaggtcagtagcctgttctctttttaaatgtgttacattgtatggtcaccaactttccccaaacacaacagtattaggtcattatggcaacttaaaagcaggttgaaggacaccccaggtgttgctcattcttgctttcactggtgcaccttttaatcccagcacttgggagactgaggcaggcaggtctaagttcaaggccagtctggtctacagatcaagagacggacggtatgggctacacagagaaactcttaaaaaaaaaaaaaacccttgaaagttattagactttcaagcttgatcttttgcgctaatgattggtacacagctctaatcccagtactctggatggcagacattgtgagattgagtgggccacaaacacataacaaactcggggcttggcttggcttggcttggctacatagacatattctgtcacaaacacatgcagtgcccctccacacatcccaaaacaaaccaagagggatgttgtgtttaaggttgagtgagggggtgcattgaggcagtgcaggagtggttgaccacatgtattctcagtcgatgagagtaggtgctgccttggatacactgagctgttgacttcagttttaccattctcaaatggtcacttatgatgtcctaaaattatagttaagtggttaaggattacattaataactctttgagcttcctgaggaatgttggctttctccgttttgatccagacatcaagccaggcactggaggtgtagctcagtatttaaagtgcttgcccagaacacatggtacccttaattctcttctcagctggaggagtgaaaaaacacacataatgaacagagtagttttttctatcagctgacatattcagttgcttagtgttctgcttgttctcttaaattttttttttatccaaatgacagcaacttatataatccagcaatgggagctttattatgtaccttccatatctttaagaagaaattcacataatttgggggagttagattaaactctgatttaagtaagcacgtttctttataatggatcagtgttagttattcaaactgcttttcccttgccctgaggagttaaagctattatgtttggggaagtttatgaccttgacattagccagacagcagtccactaactcctaatcctagaggaaaatcttcagagaataaacagttagtgttaatagcatcagtggagaaagtttctgctttgattatctgccttgatgcagtgggaaagctgtgggaaagaagggacagtagccaccacctggccttgaccatggacagcttgcaggatctgagaaatcctcccaccactgctgtactttgccaggctaacactagaggagagagggtagcgcgtcctcagcatgggtcctttttagtactggacctgtgccacaaaaagaagagagaaatagattagaaatgagaaagaaaaaagggcttttttagagaggcctgtcatttttttctctccctgggactgaactgagtttataatgaatttggactggtctcttacattttaaaataagggtgtgtggagccgggcctttactcccagcactctggaggcagaggcaggcggatttctgagttcaaggccagcctggtcttcaaaatgggttccaggacagccagagctacacagacaaaccctgtctcgaaaaactcaaaaaaaaaaaaaaaaaaaaaaaaaccctaaaaataagggtgtgtgtgtgtgtgtgtgtgtgtgtgtgtgtatgtgtgtgtgcatgtgtgtgtgcgcgtgtgtgcgcacgcgctcctttacccatgtacacccacccactggcacatgtaccttagcatggagaagtcagaggtcaattttttacagtttgtttctctcctttcatggggttctagaaattgcactcaggttcccaggcttggcagtaagaatctttattttctgagccatcttgctgacctggtgtagaagttattctcccacagatactcagatgcagctgcttgcagccctgctgggcacaatgcaagattcatacgattagaagtatgcacacatggactggtgaggtggatcagacagtgatggtgcaagccagcaagcctgattacctgagtttgaaacctggggcccacatggtggaaggagagaaccaactcccacaggttgtcctctgacctccacatgtataccatgtcttgtacttaaacatatatgaacactcacgcataaaataggtaagatgtaaagaaagagaatatgtgcatgggcatactttatgcaagacataatcctgttctgtgaaagaggccttaaaatgtagtcattttgggggctagaaaggtctcagaagttaagagtacttgcttttctctaggggacctgaatttaattcccagtacttaacagctgtctataactccaggcccaggggctttattgctctctcctggcctctgcatgtatcgggcactgcatgtatgtggtgtgtagatgtagacccaacactgatacacataaaggaacacagtttttcactgtgggggcaccttcctgtgcgctcagcccgagggaggtcaagagtcttagctgtcagccagggtattgtggctcaggcctgtagtcctaggacttcacagtgctgagacagaaggatgatgagtagaggcagccaaagagtaagattctgccttaggattgggcgtggtggcgcacgcctttaatcccagcactcgggaggcagaggcaggcggatttctgagttcgaggccagcctggtctacagagtgagtttcaggacagccagggctacacagagaaaccctgtctcgaaaaaccaaaaaaaaaaaaaagattctgccttaggaaaattaactaagtaaataaattgtaccatagccgtttacttataacaatcaataagaggaattccttttctaggaccactgaacaacagcaaagatttcatgaaatctgcagtaatctagtaaaaactcgacgcagagctgtgggctggtggaaacgcctcttttccctaaaggaagaaaagcctaaaatggtatttatttatttatttatttatttatttatttatttatttatttgtttgtttgtttgtttgtttgtttgtttatttatttttaacttactgaatgtgaagcaaaatcatgagttcactgatttcagcctagtgatagcattgctaggaatgaagttcaatacttagtccccttttgtgtaatgctgacttataaatgtctccatatcctagctttggttttggtgggaagtgctaactgggaaggtagcttagtttataagtattaatctatatagacacagtaattctaagagtaatttatttacattctatgaaagaaaattaataaaacatgtaaaacatggtattatttttcctagcctttaaaagaaaactgtttaagccgggcgtggtggctcacgcctttaatcccagcactcgggaggcagaggcaggtggatttctgagttcaaggccagcctggtctacaaagtgagttccaggacagccagggctacacagagaaannnnnnnnnnnnnnnnnnnntgctaccaagcaatgaggtgcccatcttggtggtaccaggagcagtcactttgctaagagagggcagagtaataagcccccccccaataagctgtgtgtgtaacatagcatgtctttggagctctgtgtagtgttgaggcacctgaggcaagccttcaggctgtggttgctgtgtgcagtgtagagaggccaggcttcagagttgcactggctggtctgttgctgggagctaagttgttactctttttttgccagtacttcatgaccatgatcatttctcttgctgcggtggcttgggtgggacagcaagttcacaacctgcttctcacctacctgattggtaagtcgttgaagaaacatcacatgttcaacttagcagggaagtctgactgtggtgtgtagtcagtaaatagattgagtgttcacaggacctatgggagtggggcaaggtgagaaggaaaggtttcagtctgtgctgggtcacagctcagattgtgccctgtgtcaccaaggcctgggtttgatgcccagtactggataaagctgtcattccagccctagatgcagaaggagtagaagttcaaggtcatccctttctatatgctacaggtcgggttcaaaaccagcccagctagagattcaagtcagggcttaagatagagctccatggctaaaaacatgcttggttcaattcctggctcacagcaacctatgactctagtctcagggcatctgatagcctctgctggattttgtgggcactgggcacacatatagtccacatatatgcttctagacaaagcacttgtgtatacacataaaatacaaatcttttttaaaaagactggtctctgttttcctggagttcattaaagtcatgagcaaagaggagtgaaatagaaggcactgtagtgtgagcgtgagtgcaccttcaggaggcaccttggctgcagttttgggctgaatcctgttggatggcttttgt

SEQ ID NO: 185 - DNA, 14553 bp, Mus musculus
gaggcggggaagccgtggccgtgtgagcggaacccggaacggccgtctgcctcccccgccctccgccgccccctccgcggcttcctcctcagccccgggccagatcgcagtgtcggcggcggccggttcaggcggcgactcgcgcttcttcgggcggcggcgcttggccatgtcgtgtcggggaaggtaatgagccgcagagccccggggtctcggctgagcagcggcggcggcggcaccaagtacccgcggagctggaatgactggcaacccagaactgatagtgcatcagccgacccagatactttaaaatactcctcatctagagataggggtgtttcttcctcttatggactgcaaccttcaaattcagctgtggtgtctcggcaaaggcacgatgataccagaggccatgctgacatacagaatgacgaaaagggtggctacagtgtcaatggaggatctggggaaaatacttatggtcggaagtcgttggggcaagagctgaggattaacaatgtgaccagccctgagtttaccagtgttcagcatggcagtcgtgcattagccaccaaagacatgaggaaatcacaggagcgatcgatgtcgtactctgatgagtctcgactgtcgaatcttcttcggaggatcacccgggaagatgacagagaccgaagactggctactgtaaagcagctgaaggagtttattcagcagccagaaaataaactggtactagttaaacagttggataatatcttggctgctgttcatgatgtgctcaatgaaagctacgaggctgagaagatcttcaagtggattttcagcaagtttagctcatctgcgaaagatgaggtgaagctcctctacttgtgtgccacttacagagcgctggagactgtgggggagaagaaagccttttcttcggtgatgcagcttgtgatgaccagcctacaatccatccttgaaaatgtggatacaccagaattactttgcaaatgtgttaagtgcattcttttggtggctcgttgctaccctcatattttcagcactaattttagggatacagttgatatattagttggatggcacatagatcatactcagaaaccctccctcacacagcaggtgtctgggtggttgcagagtttggagccattttgggtagctgaccttgcattttctaccactcttcttggtcaatttttagaagacatggaggcatatgctgaggacctcagccatgtggcctctggggagtcagtggatgaagatgttcctcctccatcagtgtcattaccaaagctggcagcacttctccgtgtgttcagtactgtggtgaggagcattggggaacgctttagcccaattcggggtccaccaattacagaggcatacgtaacagatgttctatacagagtaatgagatgcgtgacggctgcaaaccaagtgtttttttctgaggctgtgttgacagctgctaatgagtgtgttggtgttttgctcggcagcttggatcctagcatgactatacattgtgacatggtcattacatatggattagaccaactggagaattgccagacttgtggtaccgattatatcatctcagtcttgaatttgctcacattggttgttgctgtagctcatgctgtttatcaagcagtgctcagcttgaagaatattcctgttctggagactgcctataaattaattttgggagaaatgacttgtgcactaaacaatctgctacacagtctccagcttcctgatgcctgttctgagattaaacatgaggcttttcagaatcatgtgttcaacattgacaatgccaactttgtagttatatttgatctcagtgcactgactacaattggaaatgccaaaaactcattaattgggatgtgggcactgtctccaactgtatttgcactgctgagtaagaatctgatgattgtgcatagtgacctggctgttcacttccctgccattcagtatgcggtgctctacaccctgtattcccattgtaccaggaaattgttaatgacatgggctttggaagtggctgtattaatgaagaagtctgaaacatatgcacctttattctcccttccatcttttcataaattttccaaaggccttttagccaacactcttgttgaagatgtgaatatctgcttgcaagcatgtagcagtctccatgcgttgtcctcttctttgccagatgatctgctacaaaggtgtgttgatgtctgccgtgttcagcttgtccatagtggaactcgtattcgacaggcctttgggaagctgttgaagtcaattcctttagatgttgtactaagcaataataatcacacagagattcaggagatttctctagcattgagaagccacatgagtaaagcaccaagtaacacgttccaccctcaggacttttctgatgtcatcagtttcattttgtatggaaactctcaccgaacagggaaggacaattggttagaaagattgttctatagctgccagaggctggataagcgtgaccaatccacaattccccgcaatcttctaaagacagatgctgtcctttggcagtgggctatttgggaagctgcgcagtttactgttctttcaaagttgcgaaccccattgggcagagctcaggacacgttccagacaattgaaggcatcattagaagtcttgcagcccacacactaaaccctgaccaggatgttagtcagtggaccactgcagataatgatgaaggccatggaagcaatcagcttagacttgttcttctgcttcagtatctggagaacctggagaaattaatgtataatgcctatgagggatgtgccaatgcattaacatcacctcccaaggtcattaggacttttttctataccaatcgacagacttgccaagactggctcactcggatccgcctctccatcatgagggttggattgttggcaggtcagcctgcagtgacagtgaggcacggctttgacttacttactgaaatgaaaacaaatagtctaactcaggggagtgaattggaagtaactatcatgatggtggtagaagcactgtgtgagctccattgtcctgaagctatacacggaattgctgtctggtcatcttcagctgttggtaaaaaccttctctggattaactcagtggcccagcaggctgaagggaggtttgaaaaggcctctgtggagtaccaggagcacctgtgtgccatgacaggtgttgattgctgcatctccagctttgacaagtctgttctcacgttggccaatgctggacgtaacagtgccagccccaaacactctctaaatggtgaatccagaaaaactgtgctatccaaatcaattgactcttcccctgaagttatcagctacttaggaaataaggcttgtgagtgctacatctctattgctgactgggctgctgtgcaggagtggcagaacgcagtccatgacctgaagaagaactccagcagcacctcactcaatctgaaagccgatttcaactatatcaaaaatgtggtaaagtacttgaagcaaacctcacgcatcgctattggaccactaagattgtctactctaacggtgtcacagtccttaccagtactgagcaccctgcagctgtactgctcatctgcactcgagaacacagtttctaatagactttcaacagagcaaatacattctttcagaaatgtggtaaagtacttgaagcaaacctcacgcatcgctattggaccactaagattgtctactctaacggtgtcacagtccttaccagtactgagtaccctgcagctgtactgctcatctgcactcgagaacacagtttctaatagactttcaacagaggactgtcttatcccactctttagtgatgctcttcgctcatgtaagcaacatgatgtgcggccatggatgcaggcactgagatataccatgtaccagaatcaactgttagagaaaattaaagagcaaacagtaccaattagaagccatctcatggagttaggtctgacagcagcaaaatttgctagaaaacgggggaatgtgtcactggcgacaagactgctggcacagtgcagtgaggttcagctgggaaagacaaccactgcccaggacttagtccagcattttaaaaaactgtccactcaaggccaagtggatgaaaaatggggccctgagcttgatattgaaaaaaccaaattgttatatacagcaggccagtcaacacatgcaatggaaatgttgagttcttgtgctatatctttttgcaagtctgcgaaagctgagtatgcagtggctaagtcaattctgaccctggctaaatgggtccaggcagaatggaaagagatttcgggacagctgaggcaggtgtacagagctcagcagcaacagaacctttctggcctttctactttgtctaggaacatactcgctctaatagagctaccatctgctaatacagttggagaggagcaccctcggattgagagtgagtctacagtgcatattggagttggagaacctgacttcattttgggacagttgtatcacctgtcttcagtgcaggcacctgaagtagccaaatcttgggcagcattggctagttgggcttataggtggggcagaaaggtggttgacaatgccagtcagggagaaggtgttcgtctgttgcctagagaaaaatctgaagttcaaaatctgcttccagatactataactgaagaagagaaagagagaatatatggtattcttggacaagctgatgaagatataacacttcagataacagagagtgaagataatgaggacgatgacatggtcgatgttatctggcggcagttaatatcaagctgcccttggctttctgaacttgatgaaaatgcaactgaaggtgttattaaagtgtggcggaaagttgtggacagaatcttcagcctgtacaaattgtcttgcagtgcatattttactttccttaagctaaatgctggtcaggttctgttagatgaggatgatcccaggctccatttaagtcacagagcagagcagagcactgatgatgtgatagtgatggctaccctgcgactgctcaggttgctagtgaagcatgctggtgagctccggcagtatctggaacatggcttggagacaaccccgactgctccatggagaggaaataagtattcctctgcaatcccaactttacttggaaatattcaaggagaagaactgctggtttccgaatgtgaaggaggaagtcctcctgcttctcaggatagcaataaagatgaacctaaaagtggtttaaatgaagaccaggccatgatgcaggattgctacagcaaaattgtagataaactttcctctgccaacccaacgatggttttacaggtccagatgcttgtggcagagcttcgtagggtcactgtactctgggatgagctctggctgggagttttgttacagcagcacatgtatgtcctgagacgaattcagcaactggaggacgaggtgaagagagtccagaacaacaacaccttgcgcaaagaagagaaaattgccatcatgcgagagaagcacacagcactgatgaagcccatcgtgtttgctttggagcatgtgcggagcatcaccgctgcccctgcagagacacctcatgaaaagtggtttcaggataactatggtgatgccattgacaatgcccttgaaaaactaaagacgccatcaaatcctgccaagcctggaagcagctggattccattcaaagagataatgctgagtttgcaacagagagcgcagaaacgagcaagctacatcttgcgacttgatgagatcagtccttggttggctgccatgactaacactgaaattgcacttcctggagaagtctcagccagagatactgtgacaattcacagtgtgggtggaactatcaccatcttaccaactaaaaccaagcccaagaaactcctctttcttggatcagatgggaagagctatccttatcttttcaaaggactagaagatttgcatctggatgagagaatcatgcagtttttatctattgtgaatactatgtttgctacaattaaccggcaggaaacaccccgcttccatgcacgccactattctgtaacaccactgggaacgagatcagggctgatccagtgggtggatggagccacaccattgtttggtctttacaaacgatggcaacaacgggaagctgccttacaagcacaaaagtcctatgcgagatccaccgctgtcatgtccatggttggctacataattggtcttggagacagacatctggataatgtcctcatagatatgacaactggagaagtagttcacatagattacaatgtttgctttgaaaaaggtaaaagccttagagttcccgagaaagtgccttttcgaatgacacaaaacattgaaacagcactgggtgtaactggagtagaaggtgtttttaggctttcctgtgagcaggttctccacatcatgcggcgaggccgagagactctgctgacactcttggaggcttttgtgtatgaccccctggtggactggacagctggtggtgaggctgggtttgcaggtgctgtctatggtggaggtggccagcaggctgagagcaagcagagtaagcgagagatggaacgtgagattacccgcagcctcttttcttccagagttgctgagattaaggtgaactggtttaagaaccgggatgagatgctggttgtgcttcccaagctggacagcagcttagatgaatacctaagcctgcaggagcagctcacagatgttgaaaaactgcagggcaaactgctggaagaaatagaatttctagaaggagctgaaggagtggaccatccatctcatactctgcaacacaggtattctgagcatactcaactacagacccagcaaagagctgttcaggaagcaatccaagtgaagctgaatgagtttgaacagtggataacacattatcaggctgcattcaataacttagaagcaactcagcttgcaagtttgcttcaagagataagcacacaaatggaccttggtcccccaagctatgtaccagcaacagcctttctacagaatgctgggcaagcacacctcatcagccagtgtgagcagctagagggggaagttggcgctctgctgcagcagaggcgttctgtgctccgtggctgtctggaacagctgcatcactatgcaacagttgctctgcagtatccaaaagccatatttcagaaacatcgaattgaacagtggaaggcctggatggaagagctcatctgcaacaccacagtagagcgctgtcaagaactctataggaagtatgaaatgcagtatgctcctcagccacctccaacagtgtgtcagttcattactgctactgaaatgacccttcagcggtatgcagcagacataaacagcagacttattagacaagtggaacgtttgaaacaagaagctgtcactgtgccagtttgtgaagatcagttgaaagaaattgagcgttgcattaaagtttttcttcatgagaatggagaagaaggctctctgagtctagcaagtgtcattatttctgccctttgtactcttacaaggcgtaaccttatgatggaaggtgcagcttcaagtgctggagagcagctggttgatctgacatccagagatggagcctggtttctagaggagctgtgtagtatgagtggaaatgtcacctgcttggtgcagttactgaagcagtgccacctggtaccacaggacttggatattcccaacccagtggaagcatctgaggctgttcatttagccaatggagtatatacatctctgcaggaattaaattcaaatttccggcaaatcatattcccagaagcacttagatgtttaatgaagggggagtgcaccttagaaagtatgctccatgaactagatagtctgatcgagcagactactgatggagttcctctgcagactctggttgagtcacttcaagcctacttgcgaaacacagccatgggacttgaagaagaaactcatgctcattatattgatgttgccagaatgctacatgctcaatatggtgaattaatccaaccaagaaatggttcagttgatgaaacaccaaaaatgtcagctggccagatgcttttggtagcatttgatggcatgtttgcccaagttgaaactgcttttggcttattagttgagaagctaaacaagatggaaattcctgttgcttggcggaagattgacattattcgggaagccaggagtacccaggtcaatttttttgatgatgacaatcaccggcaggtgctagaagagattttctttttaaaaagactacagacaattaaggagttcttcaggctctgtggtaccttttctaaaacattgtcaggatcaagttcacttgaagatcagaatactgtgaatggacctgttcagattgtcaatgtgaaaaccctttttagaaattcttgctttagtgaagaccaaatggccaagcctatcaaggcctttacagctgactttgtaagacagctcttgataggactcccaaaccaagccctcggactcacattgtgtagctttatcagtgccctgggtgttgacatcattgctcaggtagaggcaaaggactttggtgctgaaagcaaagtttctgtagatgatctgtgtaagaaagctgtggagcacaatatccaggtagggaaattctcacagttggtgatgaacagagctacagtgttagccagctcctatgatacagcatggaagaagcatgacctggtgcgcaggctggaaaccagcatttcttcctgcaagacaagcctgcagcgggtgcaactgcacattgccatgttccagtggcagcatgaagacctccttatcagcagaccacaagccatgtcagtcaccccgcctcggtctgcaatcctgaccagcatgaagaagaaactgcatgctctcagtcagattgagacttcaattgggacggttcaggagaaactagcagcccttgaagcaagcattgagcagcggctgaagtgggcaggtggtgccaatcctgccctggcaccagtactacaagattttgaagcaacaatagctgaaagaagaaatcttgttctcaaagagagccagagagcaaaccaggtcacttttctctgcagcaatatcattcattttgaaagtctacgaacaagaactgccgaagccttaagcctggatgctgccttatttgaactaatcaaacggtgtcagcagatgtgttcatttgcgtcacagttcaacagttcagtttccgagttagagcttcgtttattacagagagtggacactactcttgaacatcctattggcagttctgagtggcttctatcagcacataaacaattgacccaggatatgtccacccaaagggctgttcaaacagagaaggagcagcagatagagactgtctgtgagaccatccagagcctagtcgacagtgtaaagactgtgctcaccggtcacaaccggcagcttggagatgtgaagcatctcttgaaagccatggctaaggatgaagaggctgctctagcagatgctgaagatattccctatgagagcagtgtcaggcagttcctggctgaatacaaatcatggcaagacaacattcagacggttttgttcacactagtccaggccatgggtcaggttcgaagtcaagaacatgttgaaatgctgcaggaaatcactcccaccttgaaagaattgaagacacaaagccagagtatctataataatttagtgagttttgcatcacccctagtcaccgatgcagcaaatgaatgttcaagtccaacatcatctgcaacttaccagccatcctttgctgcagcggttaggagtaacactggccagaagactcagcctgatgtcatgtctcagaatgctaaaaagctgattcagaaaaatctggctacatcagcagatactccaccaagcaccatcccaggaactggcaagagcatcgcctgtagtcctaaaaaggctgtcagagaccctaagactgggaaagctgtgcaagagagaaactcctatgcagtgagtgtgtggaagagagtgaaagccaagctagagggccgagatgttgatccaaacaggaggatgtcagttgctgagcaggttgactatgtcattaaggaagcaactaatctagataacttggctcagctgtatgaaggttggacagcttgggtgtgaatggcaagacagtagatgagtctggttaagcgaggtcagacatccaccagaatcaactcagcctcaggcatccaaagccacatcacagtcggtggtgatgcatctgggggcttactctgaggaaacctaggaaatctcggtgtactaggaagtgaatcctgcaggacagctgcactcagggatacgcccaacaccatggccagggtcaaaggtgaagaaagcaagctcactgcctgcacacggagattgtctttctgccacagaacagctgcaaacgtgtcaggaggttagctgagaaagaaatcgggctgctgcggagcacagagtgacttggaactccattccacctgaccctgtgtgtacaatccaggaaaacaaaccccgctcagaaacaagagaaaattggggccgcgaagaactcacagccacggaagagttgttgcattcagattcttgagaaacatttgttgctcggcaacagtactggttgggttgaccagttaagtaccaaaaggctatgctgtatgaatttcagaaatggactgaaaaaatggagagcagtgtaatagacacacactacatcggaagaactgacttctgaaacgaagagaaaagcacctatggatcccactccttcccatcgcttacctgttccccagctccccgttgacccaccctggtagattagccagctgtcagactcacttttatttcaatccttacacttcataaacttttgtctccacgttgttaccatatttggagacagaaacaggagtttctccaaatccaatgaaaacatggaaaattcaaggattgtttaaaggtctgtgatcatcacatacaagatgtaactctggttatttcagtcatatctgtgactctatcatgtacagtttcctgaattgtcactgtgcatccaaacgtaatgagtctaacagacactgatttcatgtgcactcccctctgcttacaatgtgcattttttggaggtcattcaaattttccctcttctgtgattgctgtagtttctttcatagaaagtagctgatctgatgtaatcttttaccttttaaacaaccaggatagagaacctattggagtttgcattgttgatgacaggttcacaataaagtgacgttctggtggaggtagagtgaaatgttttttaattcagttttctcatttgatacttttaatttacaaagtaattttgttttatgttttaaagtgtaaattaaaaatgctttagtttacctggcatttgggtatgctcagtaatgcctgccagcagcacctttaatttcagctggtggcctgtgatgggttctgtttaccttttgcaacattttatagcttgtttagtgactagtgtgtagtgagtcacgatcaaggcatccttcagcttagcattttcagtactcactgctgatccttggtagaagtgcagactagaatagagctaaaaatcacgtatcaacacagaatagcacatggtattttgagtctttttatccccccccccccccctgcattttagcaactagtgtggcggccacttaatttgccagcctctccaagcctgaaaaggtccaggtgtctaagctcttctctgactgcaacgagttgaattctaatcctcacaggatggatgccagtgtcggcactttcttaattatgagtattgaaaggtgctgttttcagtctccacatgtctgctgacaagttaaagaatctagcatatcgcatttggttttacttgttgattttgagccttattgtcacaaaacagcctagctggaatattgatgccatactatattttgcatgctattttcttccctagaggcattgagggcaattgcactttggctctctcaagatgtgtcattttcagacattcttcatgtcagaagagcttttgttgtaaggagaaaaccagctcagacttttgtccctgtaggtgatggtagtggtcagaaatggcttttgctttggtaataagtgaattttattccccaagagtctcaggcatcagaagtacttggcatcttaatccaagcaaaaataagacagcttaaaaaacaaccaaaaaaaatgtgcctctggtgaattatccatcctttttttaaaatgttaaactggtctttgagaaaagaatagtgcagataagagcagccaaggacttcaaagcttgttgatcactgcactctggataaaacccttggcttcctgttcaaatagcctttccaggtttaacttctttaaggagcctcaagtgaaaaaaacaaaaacaaaacaaaaaacccagggccactgggggaatgttttatgaaatcatgtagagtgctgtagttttgaagtcatccgttttttgatgacaaagtacctgtggaaaaccagggatatttttttttcctcaacttcttctctttactccctacccctctcctccctaattctgtcttccttctctccactcttttaagattcagagggtacagaacaacctctattatttcagagtacccttgagaattgaaatgtatttcgattagttgtctttaattagctagctagagtcagttgatatctctaccaagctgaagcctagtacctacgaagctatttctttaccaaagtctcttgcttctgcttatggtcgtgagctgatcacgcagtttgctagatgatttgacactggtggtgagttcttttgaggcgtgagatttctatgtgaaactgataggtcttgatctgctttcttagatcactgattcagagctcaaagcccaggttcagggtaagaatttgtaatacagaagaagaaagactcccttcactttgcccttaacacttgcctctgttatctaagcttcgttagtagatttcttaatatcatccaatgtttggtgttatctgcattgtttttttttttaaattgtggttgttctgatgtgtgaaatttaaggaaagagccatttaataaatgccaagcagggcaatgcagccaaatattagagttgatgtgcagtcttaggtcctttttaatctggggtattacaggcagtactttaaatcagagtcttcctggcctttttccctccacctttttgtagttactcgggggcttacttgtgcagtactaaaatcaaaggagctggttcttcttttctcccaatcttttcttagtaatgaacacacctacaactagcctgccactcccaatcacacacagcagatgtcagtgctgtgctaatattagctgcatttcctgcagggcagggatgcgaccttgcacatgctaggcaagctctctaccctgagctacgtacatcctagcccttagaactaccaccctgaagcatctttgtttcctgtgttcagacgcagacgaagaccaacattgttttatatgttgaatttataaaatgctagtaatttagaaccctccccccaaatcaaggaggcaaaaaataacgcactagtcactgaagttcatcctcagttacctcgatagggtaggtagattcctaatagtgctggtgagcatcacaatgctgtgcaaagattcaagaggaggcagtcactgtactttgcctgcttttgggcctagataacgtcactgtctacaaaaagctaactgcttaggtttgaaaaggcaaccatgtagagaaaacttgacaattggggctcattgggaagttctagtgctaatgttaaaaactcaaatcagctggctatttgaagatggcaaagaatatagttctgaaattttatttttccacaacagggtgattggcagtggttgttttccctttttctgacagtgtggttcagctcctgtttcagattctgtgtcatttttcaatttacaagtcacttaagtttctacctggaatgtcaggtggcaatgacatcacattttgtgttttttttttttttaaactcttatttaagagtaagttgagttgaactgaatcttccttgtcttagtaacattgtacaaatagtggcttatttttaagttgtaatgcctcctgatggatataattttgtgcttgtatttaagattaaaagttgaataaataacaccagcttcctgaaaatgtccataatgcatcatttgaaaaacaaaaacacctgcctactttacattaacatggtaaagattgtatgaaatacctgtttttcaaaaaaataaaaataaaggttcaagtcttaaaaagataacag

SEQ ID NO: 186 - protein, 3408 aa, Mus musculus
EAGKPWPCERNPERPSDALRRPLRGFLLSPGPDRSVGGGRFRRRLALLRAAALGHVVSGKVMSRRAPGSRLSSGGGGTKYPRSWNDWQPRTDSASADPDTLKYSSSRDRGVSSSYGLQPSNSAVVSRQRHDDTRGHADIQNDEKGGYSVNGGSGENTYGRKSLGQELRINNVTSPEFTSVQHGSRATKDMRKSQERSMSYSDESRLSNLLRRITREDDRDRRLATVKQLKEFIQQPENKLVLVKQLDNILAAVHDVLNESYEAEKIFKWIFSKFSSSAKDEVKLLYLCAYALETVGEKKAFSSVMQLVMTSLQSINVDTPELLCKCVKCILLVARCYPHIFSTNFRDTVDILVGWHIDHTQKPSLTQQVSGWLQSLEPFWVADLAFSTTLLGQFLEDMEAYAEDLSHVASGESVDEDVPPPSVSLPKLAALLRVFSTVVRSIGERFSPIRGPPITEAYVTDVLYRVMRCVTAANQVFFSEAVLTAANECVGVLLGSLDPSMTIHCDMVITYGLDQLENCQTCGTDYIISVLNLLTLVVAVAHAVYQAVLSLKNIPVLETAYKLILGEMTCALNNLLHSLQLPDACSEIKHEAFQNHVFNIDNANFVVIFDLSALTTIGNAKNSLIGMWALSPTVFALLSKNLMIVHSDLAVHFPAIQYAVLYTKHCTRKLLMTWALEVAVLMKKSETYAPLFSLPSFHKFSKGLLANTLVEDVNICLQACSSLHALSSSLPDDLLQRCVDVCRVQLVHSGTRIRQAFGKLLKSIPLDVVLSNNNHTEIQEISLALRSHMSKAPSNTFHPQDFSDVISFILYGNSHRTGKDNWLERLFYSCQRLDKRDQSTIPRNLLKTDAVLWQWAIWEAAQFTVLSKLRTPLGRAQDTFQTIEGIIRSLAAHTLNPDQDVSQWTTADNDEGHGSNQLRLVLLLQYLENLEKLMYNAYEGCANALTSPPKVIRTFFYTNRQTCQDWLTRIRLSIMRVGLLAGQPAVTVRHGFDLLTEMKTNSLTQGSELEVTIMMVVEALCELHCPEAIHGIAVWSSSAVGKNLLWINSVAQQAEGRFEKASVEYQEHLCAMTGVDCCISSFDKSVLTLANAGRNSDKHSLNGESRKTVLSKSIDSSPEVISYLGNKACECYISIADWAAVQEWQNAVHDLKKNSSSTSLNLKADFNYIKNVVKYLKQTSRIAIGPLRLSTLTVSQSLPVLSTLQLYCSSALENTVSNRLSTEQIHSFRNVVKYLKQTSRIAIGPLRLSTLTVSQSLPVLSTLQLYCSSALENTVSNRLSTEDCLIPLFSDALRSCKQHDVRPWMQALRYTMYQNQLLEKIKEQTVPIRSHLMELGLTAAKFARKRGNVSLATRLLAQCSEVQLGKTTTAQDLVQHFKKLSTQGQVDEKWGPELDIEKTKLLYTAGQSTHAMEMLSSCAISFCKSAKAEYAVAKSILTLAKWVQAEWKEISGQLRQVYRAQQQQNLSGLSTLSRNILALIELPSANTVGEEHPRIESESTVHIGVGEPDFILGQLYHLSSVQAPEVAKSWAASWAYRWGRKVVDNASQGEGVRLLPREKSEVQNLLPDTITEEEKERIYGILGQADEDITLQITESEDNEDDDMVDVIWRQLISSCPWLSELDENATEGVIKVWRKVVDRIFSLYKLSCSAYFTFLKLNAGQVLLDEDDPRLHLSHRAEQSTDDVIVMATLRLLRLLVKHAGELRQYLEHGLETTPTAPWRGNKYSSAIPTLLGNIQGEELLVSECEGGSPPASQDSNKDEPKSQEDQAMMQDCKIVDKLSSANPTMVLQVQMLVAELRRVTVLWDELWLGVLLQQHMYVLRRIQQLEDEVKRVQNNNTLRKEEKIAIMREKHTALMKPIVFALEHVRSITAAPAETFKWFQDNYGDAIDNALEKLKTPSNPAKPGSSWIPFKEIMLSLQQRAQKRASYILRLDEISPWLAAMTNTEIALPGEVSARDTVTIHSVGGTITILPTKTKPKKLLFLGSDGKSYPYLFKGLEDLHLDERIMQFLSIVNTMFATINRQETPRFHARHYSVTPLGTRSGLIQWVDGATPLFGKRWQQREAALQAQKSYARSTAVMSMVGYIIGLGDRHLDNVLIDMTTGEVVHIDYNVCFEKGKSLRVPEKVPFRMTQNIETALGVTGVEGVFRLSCEQVLHIMRRGRETLLTLLEAFVYDPLVDWTAGGEAGFAGAVYGGGGQQAESKQSKREMEREITRSLFSSRVAEIKVNWFKNRDEMLVVLPKLDSSLDEYLSLQEQLTDVEKLQGKLLEEIEFLEGAEGVDHPSHTLQHRYSEHTQLQTQQRAVQEAIQVKLNEFEQWITHYQAAFNNLEATQLASLLQEISTQMDLGPPSYVPATAFLQNAGQAHLISQCEQLEGEVGALLQQRRSVLRGCLEQLHHYATVQYPKAIFQKHRIEQWKAWMEELICNTTVERCQELYRKYEMQYAPQPPPTVCQFITATEMTLQRYAADINSRLIRQVERLKQEAVTVPVCEDQLKEIERCIKVFLHENGEEGSLSLASVIISALCTLTRRNLMMEGAASSAGEQLVDLTSRDGAWFLEELCSMSGNVTCLVQLLKQCHLVPQDLDIPNPVEASEAVHLANGVYTSLQELNSNFRQIIFPEALRCLMKGECTLESMLHELDSLIEQTTDGVPLQTLVESLQAYLRNTAMGLEEETHAHYIDVARMLHAQYGELIQPRNGSVDETPKMSAGQMLLVAFDGMFAQVETAFGLLVEKLNKMEIPVAWRKIDIIREARSTQVNFFDDDNHRQVLEEIFFLKRLQTIKEFFRLCGTFSKTLSGSSSLEDQNTVNGPVQIVNVKTLFRNSCFSEDQMAKPIKAFTADFVRQLLIGLPNQALGLTLCSFISALGVDIIAQVEAKDFGAESKVSVDDLCKKAVEHNIQVGKFSQLVMNRATVLASSYDTAWKKHDLVRRLETSISSCKTSLQRVQLHIAMFQWQHEDLLISRPQAMSVTPPRSAILTSMKKKLHALSQIETSIGTVQEKLAALEASIEQRLKWAGGANPAPVLQDFEATIAERRNLVLKESQRANQVTFLCSNIIHFESLRTRTAEALSLDAALFELIKRCQQMCSFASQFNSSVSELELRLLQRVDTTLEHPIGSSEWLLSAHKQLTQDMSTQRAVQTEKEQQIETVCETIQSLVDSVKTVLTGHNRQLGDVKHLLKAMAKDEEAADAEDIPYESSVRQFLAEYKSWQDNIQTVLFTLVQAMGQVRSQEHVEMLQEITPTLKELKTQSQSIYNNLVSFDLVTDAANECSSPTSSATYQPSFAAAVRSNTGQKTQPDVMSQNAKKLIQKNLATSADTPPSTIPGTGKSIACSPKKAVRDPKTGKAVQERNSYAVSVWKRVKAKLEGRDVDPNRRMSVAEQVDYVIKEATNLDNLAQLYEGWTAWV

SEQ ID NO: 187 - DNA, 136130 bp, Homo sapiens
  misc_feature (1)...(136130): n = A,T,C or G
ggctgaggcaggagaattatttgaacccgggaggcggaggttgcagtgagccgagatcatgccactgcactccagcctgggcaacagagggagactctgtttaaaaaacaaacaaataaataaataaaagttaatctcatccaaaaataccctcacagactgggtgtggtggctcatgccttgtaatcccaacactttgtgaatctgaaggagtagactcgcttgagcccaggagtttgagaccagcctgggcaacatagtgagaccttgtctctacaaaaaattaaaaaattagctgggcatggtggcacacacctgtggtcctagctacacctgaggctgagggaggaagctcactggagcctgagaggtcaaggctgcagtgagccatgattgcaccactgcactccagcctggctgacaaagcaagaccccgtctcaaaaagtaatgaaaaaaaaaatatcctcacagacacacccagaatactgttcaaccaaatatctgggcaccctgtgccccagtcaatttgacacattaaaattaactgtcacaatatccttccagccttttcctatatctatataacattacataacatatatatagatagctataagtctatttcttttctttattattattatttttaagatagggtcttactctatcactcatgctggagtgtagtggtgcaattttggctcactgcaacctccacctcctaggctcaagcaattctctcacctcagcatcctgagtagctgggactacaggtgtgtaccaccatgcatggctaaatttttttttttttttttttttttttttgtagagacagggtttctccatgttgcccaggttggtcttgaaattctggactcaagtgatcactcaccttggcctcccagagtcctgggattacaggcatgtgttaccaggcccagctggtgtatttctcttctttttcttcttcttcttctttttttttttttttttgtgtgtgtgagatggagtcttgctctgtcatccaggctggactgcagtggcatgatctcagctcataataacctccaccttccgggttcaggcgattctcccacctcagccttccaagtagctgggattacaggcacctgccatcatgcctggctaatttttgcatttttgtagagacggggtttcaccatgttggtcaggctggtctccagctcctctgtgggaggtggggggattgcttaaggcatggagctcaagatcagtctgggcaacatagaaagaccccatctctgggcgggcagggtggctcacgcctgtaatcccagcactttgggaggccgaggcgggcagatcacgaggtcagaagatggagaccagcctggccaacatggtgaaaccctttctcttctaaaaatacaaaaaattagccgggcatggtggcaagtgcctgtaatctcagctactcaggaggctgtggcagaagaatcgcttgaacccgggaggtggaggttgtagtgagctgaaatcgtgccactgcactccagcctgggcgacagagtgagactctgtctcaaaaaaaaaattaataaataaaataaaaaggctggacatggtggctcacacctgtaatcccagcactttgggagaccgaggtgactggatcacctgaggtcaggagttcgagactagcctggccaacatggagaaaccctgtctctactaaaatacaaagtagccagtgtggtggcacatgcctgtaatcccagctacttggaaggctgaggcaggagaattgcttgaatcttggatgcagaggttgcagtgagccatgatcacgccatttcactccattcctgggtaacaagagtgaaactccgtcaaaaaaaaaaaaaatccaactagcccagtgtatgttgtggaatacacctgtagtcccagctacttgggaggctaaggtgagaaaatcacttgtgcccaagaggttgagctgcagtgagctgtgtttgcagcactgcaactcaatctgggtaatagagcaagaccctgtctcaaaaaaaataaaaataaaataaaaaagtaaagaaaagaaagaaagaaaaagagagagactgggcacagtggctcatgcctgtaatcccagcactttgggaggctgaggtgggtggatcacctgaggtcaggagtgcgagaccaacctgaccaacatagtgaaaccccatctctactaaaaatgcaaaattagccgggtatggcggcaggcacctgtaaccccagctactcgggaggctgaggcaggagaattgcttgaacccgggaagtggaggttgcaatgagccgagatcgtgccactgcactccagtctgggtgacggactagactccatcaaaaaaagaagaaagagaaaaagagaaaagaaagaaagaaagaaagaaaagaaagaaaggaaagaaaagaaataaaaataaaattcttagtaagtggctgttattagtttgacacaaaggtaaaaaagatggtatctgcttttaaattgagtagtacagggccaggcttttattagtccccttccatccctgatgtttgctgggagtaaacacttccccaatacttgttgataatttggagattagactattatttttctacaatcctattattttcatatccctgtttcctttacccgaggtgatgtaatactcagccatctgctccccttcatctaaaaactaccttaagtcctgctttatctgagaagcctcttccagggaccagcagggagggtcctctgagacgtggtatgcctgggggatggtgaaaacactatgccaagcagtgtgaccttcaaattatacagcacaaaacactttatggaataagcctccatttgcttccctggtatgggatgaagaaatcatttcagctaagacatagatagcagtgtcccaaagaagctaaatgatcctatttcaactagaagttctgaagtgaaatatttatccttcccttatttggtagtctctttaactctttagagttaaacttgctgggcgcagtggatcacgcctgtagtcccagctactcgggaggctgaggcaggagaatcgcttgaacccaggaggcagaggttgcagtgagccaagactgtatttttagtagagattgggtttcaccatattggccaggctggtcttgaactcctgacctcaggtgagccacccacctcagcctcccaaagtgctgggattacaggcatgagccactgcgtccagcatgttaaatgataactgtataaacaatagagggcagtaacttgctgttgggagattttatttacataagtttgcattttatttacatatattcctaataatggattaatcagggaaagcaaaggagttagctccattaaaatcaccatgccagtccttgggcagctcaggaccaaacataagggaatttcactttcttgttttctccaatttaaaagttacaaatagcttaagatgagcatcaccggcttcctattttattgttgaaagaatgcacgagccactgggcagcacttcttgtgccctgattcatagaattttggcccctgcctcaagctgagactgcccaagtggagatttcaaatgtgtcatgaggtttctcagccaaattcctcctgcaccagcttgaaaaatcgctataaaaatagcccttactgagggagcctgacctgtgacaaagatttcctagctgggagcaggaacaagaaggctgctgtttttctttttgaaaaatctgctttaatgtctttatgatgtggatttgcttttaagattgcattttaaaaatcacccatgtaagttgagtctcctggttgagaataaagttcctcaattcttggtgcctaataggggttaatcctgggccagacatagggtcaaaagaaaacaaaagagagaattctcttttgtttacttagagaataaatgtcagtacagtgtctctctaggaagtttggaagatttctaggaaaatcctggtgatgaaagaccctggggttggtttgtgttcgaatccttactggaagatcttttaggagttaagacaggatcacgttactcacagtttttgaggttctgagtgtatcaaaaatttaagaaataacaaagagcattcacaatttgtactatattttgtttcctttttatgttttgaacacttttaacacaaggggaaacaaactatgaagcgatgtaattacatgttcaccaggtaataatataatttattaggaagtatgaatgccatgcacagcctctacaggtgtgtgagctggtaatggacatagtttgttaacttcagacttccttcctgttcgagtgtctctgggactctgggtctaacttcactaggcgatcacgtcaaaggtctaaatctgacgcctttgacgaatgtggagttggggccaaatgtcccttctgtctctgcctgtgacattcccttcctggccctgcctgctaccagctgggtgaccttgtgcagggagctagcttctcttggtatcacagccccaaagtgtaaaatgccacattgaaacctaccttagcttggtttgggggaattccttgaagtaacaactcatattgatcatttgactgagtggttttgcattagtaaatgctcaataaaggccgagtgccgtggctcatgcctgtaatcccagcactttgggaggctgaggtgggcagatgacctgaggtcaggagttcgagaccagcctggccaacatggcgaaatcctgtctttactaaaaacacaaaaattagctgggcatggtggcacatgcctgtagtcccagctgctcgggaggctgaggcaggagaattgcttgaacctgggaggcggaggttgcagtgagccgagatgttgctactacactccagcttgggcgacagagcaagactccatctcaaaataaaataaaataaaataaaataaaaaataaatgctcaataaacattaggtagagttggtcactatttttagagctaagacttgatgtcttggctaaagtttactcagttggtctgtctgagtcactgccacactctaagagtattcattctctgttcattcattcaacacctatttattgaatgcttacttttagctttgtaaatttttgttttaggccgggcacagtggcttacacctgtaatcccagcactttgggaggcggaggcgggcggatcacctgaggtcgggagtttgagaccaacctgcccagcatggtgaaaccctgtctctactaaaaatacaaaaattagctgggcatggtggcagacgcctgtaataccagctactcgggaagctgaggcaggagaatcgcttgaacccgggaggtggaggttgcagtgagccgagatcgagacattgccctccagcctgggcaacaagagcaaaactctgtctcaaaaaaaaaaaaaaaaaaaacaaaacttcacaaatgtaatttgtaatggctgcagaaaatttcagctctgaatgtactgcatcctaatcagtttcctattgttgagcattagtataatttccaggtgttttgtttttgttttgctattaataagtaaaactgagatgaatacttctgtatcaatcttgatccttattttagataatttccatttcattcctcccatttcttgagtgcttcctatggtcaggtgctgtgctgtgtgctgagtatggaggaggtaggctgagatagatgtgacctttgctcttgcaaagctgatatcctaagggttggaccgatgctaaatatgcaaagaaacccaatacttgcagatggtgctgggtactaccaaggaaagaaatagggtatgtgacagagtacctggaaagggcactggccagcttttatgggcaagggacgtcaaagaaacctgtctggagatgagacaggccaggaaaatcagggcaggggccagagtagggcaaatgtggtgcctagagcctcatttttttttttagatggattctcgccctgttgcccaggctggagtgcaatggcaggatctcagcctactgcaacctctgcctcccaggttcaagcaattctcctgccccagcctcctgagtagctgggattacggcagagcctcaaatttaaggagggacttactcacaggattgtgcaaatgcaaagttggcttttgcatgaccctgggagtaggtgcctccttaaattttgcaccctcagcaactccatcacctgtcacgttgctagtcccaaccctgatgggaacaaatgcagggaaggcattccagatggcgggaacagcaagtacaaaaatccagaggccagaaaggcttggtgtgtttcaggaacagaaactcggctcccatgactgaaatggagtagggaaatcctaatggaaccagagaggcagaaccaccaacaggaagaagaaaaaaatgttggaagttatgagagttgctcacgtttgattcatttgattaattttattgaaatggagtctcactctgttgcccaggctggagtgtagtggcacgatctaggctcactgcaacctccacctcctaggcttaagtgattctctcatctcagcctcccaaagtgctgggattacaggcgtgagccaccatgccccacctgaagcaatttctctgttgtctttttttttttaacttctctcatagaaataattaaccctcaaaaacactcagtgttgacaaagggtggtgtgaggacacagaaagtatcagactatcattggcagaaacttctggaaagcaacttaacagtctgtatccaaagacttaaaatcattaacagccttttccccaataactccacttctcggaatctatcctaaggaaatctgccacagccagagtgattttttccgtccccttaagaaatggtctcatcctgttgcccaggctggagtgcagcggcaccattatggctcaccacagcctgaaactcgtgggctcaagcgattctcccacctcagcctcccaagtaattgggatcacaggcatgcctccatatccatatgcctagatggataatattttgaccaataaagaaaaagagggccaggcgcggtggctcacgcctgtaatcccatcactttgggaggccgaggcgggcggatcacgaggtcaggagattgagaccatcctgcctaacacggtgaaaccccgtctccactaaaaatataaaaaacaaaattagccgggcttggtggcgggcgcctgtaatcccagctactcgggaggctgaggcgggagaatggcttgaacccgggaggcagagcttgcagtgagccgagactgtgccactgcactctagcctgggcgacagaatgagactccatctcaaaaaataataaaaataaaataaaaaaattaaaaagaaaaagaaaggtagtaccagagattgtgtccagttgctcaagcaatttctaacttgtctaatgtaaaaaaattttaaatttttacacaaaattagccgggcatggtggcatgtgcctgtaatcttagctacttgggaggctaaggcaggagactcgcttgaacctggaaggcagaggttgcagtgagctgagatcgcaccattgcactccagcctgggccacaagagtgaaactgtgtctgaaaaaaaaatttaataatttttgtagagatgggggtctcactatgttgctcaggctggcctataactcccaggctcaaggatcttccagtctcagcctcccatcactggaattacaggcatgaatcacttcacctaaatgatttttttttttttggagacagtcttgctctgtcacccaggctggagttcagtggcatgatctcggctcactgcaacctctggctcccgggttcaagcaatcctcatgcctcagcttccccgaatagctgggactacaggcgtgcgccaccatgcctggctaatttttgtatttttttgtagagatggggtttcaccatgtttgtcaggctggtctcctgacctcaaatgatccacccacctcggcctcccaaagtgctgggattacaggagtcagccatccatggtgcccctccttttctttttcttctcctccctccctccctccctaccctccgcagcccaggctggagtgcagtggcgggatcataggtcactgcagcctccacccgctggactcaagtcatcctcctgcctcaccctcctgagttcctgggaccacaggcacgcgctaccacgccagctaatttttgtaatttttgtagtccccatcatttagaactggcaggatcctcccttagtgagggattggtggccataagcaaggagcccaaggtggaggggatatgcatgtgtgtgaaggggtcaactcctcgtaatcttcaagtacttttggtaacaatatttatttgcacaagcgatatataaagacgttttctttgcaacataaaatgataggttatgactccttatgcagatacggtttagacactcgtttaaggagcatcctggcccaacttttaaaaaacgtgtgtgcattcacgttatgcatcagatgctttagggaacttttttccctggggcatgggacacgtcatggggtagacggtcgggtacgtctcctctacccagctgctgctttgttttttttttctttttgagacagagtcttgctctgtcgcccacgctggagtgcagtggagccatctctgctcactgtgagctccgcctcccgggttcacgccattctcctgcctcagcctcaggagtagctgggactacaggcacccgccaccacgcccggctaattttttgtatttttagtagagacggggtttcaccgtgttagccaggatggtctcgatctcctgacctcgtgatccgcccgcctcggcctcccaaagtgctgggattacagacgtgatccaccacgcccggccttctctctttcttttcttttttcctttcctttcctttcctttcctttccttccttcctcccttccttccttccttcctttttcttccctccctcctttctctctctcttttatttttttgagacagagtttcactcttgttgtccaggctggactgcaatggtctgatctcggctcactgcaacctcggcctgctgggttcaagcgattcccctgcctcagcctcccaagtagctgggattacaggcgccctccaccatgcccggctaatttttgtatttttagtagaggcggggtttctccatgttggctaggctggtcgggaactcctcacctcagacgatccgcccacctcggcctccgaaagtgctgggattacaggcgtgatccaccgcgcctagcccccagcttctttcaccagcagaaggcgggcaagcctcagggtgaaaggacttcaaagcacatttcacattgcagaggacagggtttggtgatcgtgggtactcccttcccttccatcgtttagtttttttcattgtgaagaaatggtaaaaggtgccaggactcgatgggcacatttcaggtggaggttgggaaggtggatatccacctctcgatcttactattttcactttccaccccaccccgtagaaagtgggaaaactggcgcacgtgaatccaagggcacgcctgtgtgcgcgcgcaccgcagggcaccagcccccacccacaccgcaggtccttgattggacgcctgtttacacctgactgcccggccctccggtgctttccgggaagcgtttgggagaaaagtgtgtggccgcagtagtggagatcccctgtcttaggattcgtcaccgctacgcccagacctcttcgccgcccaagggcctggggacgtggggggcggggcggcctgctatcgaccccgcctctctcggctccgccccgccgacaggacccgcctctctccccaggcccggcgggcgccaaccccgcccctcgctcccagcatgccgtgcgacagcggcggcgcggcgggcggagccgggaggcggggaagcagtggccgtgtgagcgtgaggagctgccgccaccgcctgctcctcgtcgtcctcgtcctccggggccccggcgacgtgggccgcgcacggccctggaaaagacgtcgcctccccttcatccgcctctctctcaccgcgccgctcccgcctcctcgtcctgcgctgcgggctcaggcggaacccggaacggccgtcctcttcccccgccctccgccgcctcctccttctcctcctcctcctcctcctcctccttctcggcttcctcctcagccccgggccggagcggggtgtcggcggcggccggttcgggcggcgactcgcgcttctttgggcggcggcgcttggccatgtcgtgtcggggaaggtaatgagccgcagagccccggggtctcggctgagcagcggcggcggcggcggcggcaccaagtatccgcggagctggaatgactggcaacccaggtgggtgaccggcccgggaccccgccccgacctcccgggctccgcctcgggcgggccgaggcctagggccgcggggctgggaggcgcggcctaggccctccacccctcggagccgggcgcggcttcctgggtctcctccgccccggctgggggaggaaggccgcggggaggcgaggcctaagtgcctcccctccctgcttgttcagcccggggctggagccgagacccggggctcccggcggtggcactggcctggggtcgggaccaggaggtgagaaagaggcgggggtgggggtggggggcattccagttacagcctccccctgaccccgagttgggagatgctgagagtccaggaccctccctgttactcattcactttctcggttccccactctttcagccgccacgtgagagctcttctaacctctgttcctttctgtgacccccacgtgttaatattgaaaaaaacaaaacaaaactccagctaaggcattgctctgactctaggcagaacattcattagtggagcatgagatgagattgtgtgactgttgatgggatcgacccacgctggtcttgggcgatggaagttttccctaagtgcaaggccggttactctggtgaatcgtaattcatacctggacacttgagtgaactctttgggcacccacttagaagtctagagaatttcctcatttatggaggatttgatctcagaccgttttggggcttagtgagatttgaatatattaggaacattaactttttaaataaatgtagtttcctgtctttttgatcaatgggagggcagctgtgcctaatttaggactgatttattctaatctctcttaataaatgcttgtattcagagtctgtttggaatttaacccaatgcttagaactccttaaatatgcagaaatatattttaggggtaattgattcatggaactctcctactttggagcacaattgttattataattgtccagaaactggccaaataatgtagaacgcgcaagttgttgggaagcccttttgtttcctgatagttacatgtaattccagcagtatttggaaataatttgctaagatgttagaatgtaacatttgaagactcgttagaaaaatcaataaaattatctttggctaataggtggtacacatcttagtctatttaatatgcctttccaaatactgtgtctgttgagaattggtgtatataactagatgactttaataattagtgcctgagtctagaattgagatgtttagtcgtaaaaaaaaaaatattgttcgataaacagcgttgacttgtcttgtaccacttaagagtttgtgagtgctttaaataaaattagttgattaagtatttttttctatgattgacatgcttagttttgcctttttattgaaatgtgtgaaatttgattttctggcatctaacaaattaggtggtaaataaatgacaatggattttctattatttttcagtattgtgatcagtataagtatataagagaatttagtaaccttttagaagaataaagtgcccttcccaaatagtcctacagcttttggaaaagtgtaaattgtagttggtagttctaaataaatagagaagagtcgcagccacgtgctagggccagctgacttcattgctgacaggtatgaagccaaatggcttatgtagttatggaatatgtacatgagctattaataaatattatccatgttgtttctttcaagtgctttatttcttggctctggggaggggcgatgggggaagggaggagcttacaagaaagcttacaaggtttctttgaagctgtgctttttgtaagaaagtttcaggatgtaacgccttggtagacgatactgtgatatacatttggttatagggagtaacagtttgttaggatgttggaaagatttgattttctcctgttgtagagggaacagggaagtgtggacataccccatagcataacttgatttgttgctaagattgtcatagctgatttgttagtcaataaaaatacctggggtgtttgccaagtcataaatttttattagttaaatttgaggtgattctgtcccctattcagaaagacgacagactccaggtaactgacagaacggatcttgatcttgcttcttgcttaaatgaaggtttagaacatcttcagatgcaggcacatttattatggttcatctgaataattttgattaatttttttttgcctcttatgtaccattttgtccctggtgttttggttctgttttccttgatgtaggccttttttttttccttcctgagatggagtcttgctctgtctcccaggctggagtgcagtggtgtcatctcgactcactgcagcctctgcctcccggttacaaggaaaaattctcctgcctcagcctcctgagtagctgggattacaggcgtccagctaatttttgtatttttagtagagacgggattccaccatgttggccagcctgttcttggactcctgactcaggtgatccgcctgctttggcctcccgaagtgctgggattacaggtgtaagtcaccgcactcagccgatttaggcttttgaaaaagcaacacttgttgatttcttttagtgttagtttgccagttggtgtggaaaatgactgttgagtccattttgaccacacatgatacttcacacatactgacaggaagtgttgcaggtggctgtatacgtgaatgtcatatggcaagagagcaaacccgtgttccatagaagcatacctccaacagtaagcatttatatggcactggcttatagtcttccttttcattcactgtgctcccagtcaactcttctgtaaatttttttgagaacagggtcttgctgtgtcacccaggctggagtgcagtggcacagatacttggcttactgcagtctcgacctcccaggctcaagcctcctgcctcagcatccacaagtagctggggctacaggcgcttgccaacagcccggctcatttttgtattttttgtagagatggggttttcaccacgttgcccaggctggtcttgaacccctgaactcaaacagtctgcccaccttcagtctcccaaagtgttgagattacaggtgtgagccaccgcacccgacatttaagaatggttaagcaggccgggggcagtggctcacacctgtaatcccagcactttgggaggctgaggtgggtggatcacccgaggtcaggaattcgagaccagcctggccaactgacatggtgaaaccccgtctctactaaaataaataaataaataaataaattagcgggatatggtggtgcatgcctgtaatcccagttactcgggaggctgaggcaggagaatcacttgaacctgagaggcggaggttgtcctgagcgacatcacaccactgcactccagcctgggcaacagagcaagactccttctcaaagaatggttaaacaaatgagtggtcttaggtcagttgtattatttgaaatctatgggttcctcaagcgtaaagttgagaaggttttgggaaccactggatgcctctggtttttttcatatgaagaaacaggggtggtggcttcttagaacaaagggatatctgacctatggaggttgccctctttactcctcttccctaaaaaaatgacctatcattgccaatagctaaagtctgtcattttttccaccttagtttggaagataatcttctagtatcaatcaagacagagatcagaatgatgtgttttaaaattaaatgtgtaattcataattgtacattttaatattctaaagtgactgattaatttgacattggagtcaaatagattgattaattcaacaaagaagagaaggcattcaagtcaacagaaaacaagtagattttacttctccactcggggttttaggacattaattgtgtaattggtcttacttgtttagtagtagatctatattgagtgtcttactgtgcccaaacttaggatctttctatacttctaaaaggatgaaactgtataataaaaagaccttccaattttggtagattgtagacagattaaagtattcaaaagtacacacatcttctctgttgtgaaagaccaagaaatggaaatgtgttgtgaaattagaaaagctgtatactagtatgtctgatgttgtgagaagctggatttttgaaaccagagttgtctattcagccttttatcagtctgtactaagtttgatgtccataggtacataatacggggaaatacataaaggataaaattaagtgaagttacatattttatacctattaggtgggtgcaaaagtaattgcggttttggcaaaaaccgcaattactttcacaccagtctaatattaaatggaactagagtcaaatagaattcagtgatttccagttctgttccacggatttcaaagtacactaaggaaaatttcagcaaattgtgtatggctattttacttgaggggagagtaaaacagccataataaactaaaaaataaaaatgaaaaataaaactaaaggaacgtttgtttttatgtttttcttttcttttctttcctctgttttgagatatgctcttgctctgttgtccaggctggagtgcagtggtgcaatcactgctcactgcagccttgacttcctctgggaatcctcccgccttagcctcctgagtagctgggaccacaggtgcataccaccacaccactaataaattagtcccaggctaatttatttatttttcctctctctctctctcttttttttttttttttttgagacagagttttactttgtcgcccaggctggagtatagtggcacaatctcagctcacttgtaacctccatctcctggttcaagtgattctcctgtctcagcctcccaagtagctgggaatacaggtacatgccactatgcccggctaatttttgtgtttttagtggagatgggatttcaccatgttggccaggctggtcttgaactgctgacctcaggtgatccaccggcttcggcctcccaaagtgctgggattacagacgtgagccaccatgcctggcttcctctctctttttctgaaacagagtcttactccattgctcaggttggagtgcagtggaaccatctcagctcactgcagcctccacctcccaggctcagtaagtcctcctacctcaccctcccaatagctgggaccacacgtgcatgtcaccacccccagctactttatttttttttgttttttgtagagatggggttttgccatgctgcctgggctggtcttgaatacctaggctcaagtgatccttcctccttggcctcccaaagtgctgggattacaggtgtgacccaccatgcttggcacgctaattttttatttttatttttttgtagagatggggcctccccatgttgcccatgctggtgtcaaactcctactccattatgaaataagtcattccttatgaaacacttagtaattgtatctttaagttgaaccttcacctcaccccaactttttttttttttttttttgagacggagttttgctcttgttgtccaggctggagtgcaatggtgcaatctcggctcactgcaacctccacctcccaggtacaagcgattttcctgtctcagcctcctaagtagatcagattaccggcatgtgccaccacacccggctaacttttttatatttagtagagacggggtttcaccatgttagtcaggctggtcgtgaactcctgacctcaggtgatccacctgcctcggcctcccaaagtgctgggattacaggtgtgtgccactgcacccggcctttttttttaagacatagttttactctgtctcccaggctggagtgcagtggcacgatcttggctcagtacaacctccacctcctgggtttaagtgattcacgtgcctcagcctcccgagtagctgggactacaggtgcatgtcaccaggcccggctaatttttgtattagagacagggtttcgccatgttggccaggctggtcccgaactcctgacctcaggttcccacctcggcttctcagagtgctgggattacaggagtgagacaccgtgcctggacccccccaaccccttttgttttgattcctttacaaattagtataatggaaggtttgtttgttttttataacaggtaatgaaatactctaattcagtaaatattgatgcttctagggagattgtgtgtgtgtgtgtgtgtgtgtgtgtgtgtgtgtgtgtgtatatatatacacacacacacacacatttttttttttgagacggagtgttgctctgttgcccaggctagagtgcagtggcgcaatctcggctcactgccagctctgcttcccgggttcacgccattctcctgcctcatcctcctgagtagctgggattgcaggtgcccgctatgatgcctggctaattttttgtatttttagtagagatggggtttcaccgtgttagccaggatggtcttgatcttctgatgtcatgatccgcccgcctcagcctcccaaagtgctgggattacaggcatgagccaccgtgcccggtcataaattttttttttagagatggggtctcactgtgttgcccaggctgaaatgcactggtgcagtcttggctcactgcaacctcggcctcctgggttcaagcgattctcctacctcagcctcccgagtagctgggattacaggcatgtgccactacccctggctaatttttgtatttttagtagagatggggtttcaccatgtcgaccaggctggtctcgaacttctgacctcaagtgatatgcctgtcttggcctcccaaagtgctgggattacaggcataagctactgcactgggccacggccaggatttttatgacttgtaaaaccactgtcttcaaggaggctataagttattatgggagaaaagtaaagggctttgtaaaggggagagcatgtggattttgtgatacaattctcagtataccttccttcctttctttttttttgagacagtcttgctctgtcacttaggctggagtgcagtggcatgattgacagggtttcgccaggttggccaggctggtcttgaactcctgacctcaggtgatctgcccgccttgacctcccaaagtgctggggttacaggccaacatggtgaaaccccgtctctactaaaaatacaaaaattagctggatgcagtggtgggtgcctgtaatcccagctacttgggaggctgaggcaggagaatcgcttgaacccaggaggtgaaggttgcagtgagccaagatcatgccattgcactccagtctgggtgacagagtgagactgtctcaaaaacaaaaacaaaaacctggagggtcagaggagggaaagctatacagttaagtatggagcggtagggtgatggaattggtctgtacaattttcactgtgaatttgggggagaatcccccccaaaatagaagaaaattaggataagaccaggtgcaaattgtcagtgtgtagagaaattgggtacttctgaggagtaatacaaataagaggtgaagctgaagcactgggttgggaaccctattgtaggccttgaatcatagttcaagtgtttttttctttgtttgtttgtttgtttgtttttggagacggagtttttgctcttgttgcccaggctggagcacaatggtgccattttggctcactgcaacctccgcctcccgggttcaagcagttctccttcctcagcctcccaagtagctctagggattacaggcacgcaccaccacacccggctaatcttttgtatttactagagacggggtttcaccatgttggtcaggcttgtcttgaactcatgacctcaggtgatccacccatcccagcctcccaaagtgctgggattacaggcgtgagccaccaccctggcccagttcaagtgtatttggagtgactttagggaatcatattagctgcgggagagtggcacaatttaggaagattaaatctagttgcttcttgaaaaagtgtgtgggctgggcgtggtggctcatgcctgtaatcccagcagtttgggaggctgaagtgggtggatctcctgaggtggggagttcgagactagcctgaccaacatggagaaaccccgtctctactaaaaatacaaaattagtcgagtgtggtggtgcatgcctgtattcccagctactcgggaggctgaggcaggagaattgctggaacctaggaggccaaggttgtggtgaactgaaattgcgccgttgcactccagcttgggcaacaagagcaagactccatctgaaaaaaaaatggagtgtgtgtgttagagtgcgtgcatgcatgtgcaagagaaatcgcagtgggaggcagttaattggaacaatatagagaaggggctgctaaggacctgagtattatgtttatatttaacaatttaagataaggctgtgtatgtatggtggctcatacctgtaatcccagcactttgggagggcaaggtgggtggatcatctgaggtcgggagagaccagcctgaccagcatggagaaaccccatgtctactaaaaatacaataattagccgggcatggtggcatatgcctgtaatcccagctacttgggaggctgaggcaggagaatcacttgaacctgggagatggaggttgtggtgagccgagatcgggccattgtactccagcctgggcaacaggagcgaaactctgtctcaaaaaataaataaataaattaattaattaattaaggtaaaagtgttcagctcaatatgtgagaatttccataagcaaaagcccctcatttgttatctggtgttgattgaggatgattactaaagtgatactttttatctgctcaatcttcatgttagacacatgtatggaatgtcatataagtgtcatataaaatggagtgtggtccatggtgtcttttgggaacattgaattgttacaattctttaggattttctgcctttgttacctgactcttgttccttatcctaatcgcctaaaacaaatccctgaggctcctttcattggaccacccttgatgattcagaggagctgtttgttatcttttcatgttgtcattattttggttacctgtctttgactatcttgaagtttttcagagcccattttatttttggaactataaaatgaaacatacttccccttgtatagaggcctaacagtaaagagtacagaaatttgtggtttcatatgtatgggaaatgctcccttattctgtgtttttttttgtgtgtgttttttaatgtagagtataacttactaaattcttgtggagtttgctcatgcagagatacttggttttataatgttattctttttttttttttttttttttttgagatggagtctcaccgtcgcccacgctggagtgcagtggcaggatctcggctcactgcaggctccaccccccggggttcacgccattctcctgcctcagcctcccgagtagctgggactacaggcgcccgccacctcgcccagctaattttttgtatttttggtagagacggggtttcactatgttagccaggatggtctcgatctcctgacctcgtgatccgcccaccttggcctcccaaagtgctgggattacaggcgtgagccaccgtgcctggcctataatgttattcttttccatcttgtattaatcaagtgtacttttcctttttagattgaattctcttttgaattctattgtggtgcttctttgagataaaatttatgtatgtataagtggtggtggttttttttttttttctggtttttttttttttttttttttgagacgaagtgtcgctcttatcccccaggctggagtgcaatggtgtgatcacggctcactgcaacctctgcctcccgggttcaagtgattcttctgcctcagccacctgagtagctgggattacagatgcctgccaccacgcctggctggtttttgtacttttagtagagatggggtttcaccatgttggccaggctggtcttgaactcctgacctcaggtgatccacctgcctcggcctcccaaagtgctgggattacaggcgtgagccaccacgcctggcctgtataggtcttaaattcagtaaattttgacaaatctatacacctgtgtaaccatgacctcagtcaaggtacagatatgcagtgactttttcactatgacacccattcctgccacgtttttttcatatccttaccactatctggaatttttatgtgtgccatctccagtaaaatacaacctgcatatgtgcatggatctggtaaaattgttacttttgctatccccttctttcctactaagtgcatcaataaatagcatccactctatatttgtgtcttcctcaagtaaatacatgaaaatgagatcctgcaagtttgtgtttttatagttagtgttaactccagagattacaacactgttcttgtaggatgtgtttttggggaaagcgttcctcttatggcagccctgttagcctgaggcagggcttaaacaaactgagcaggctcaaaaggacagtattgtaatggactggagtggccagatctttttacagaagaaagaatacggtaatttggccacgtgcagtggctcacacctgtaatctcagcaatttgggaggccgaggtgggcggatcatgaggtcaagggatcaagaccatcctggccaacatggtgaaaccccatctcgactaaaaaatatacaaaaattagctgggcatggtggcacacacctgtagtcccagctattcaggaggctgaggcaggagaattgcttgaacttgggaggcggaggttgcagtgagtggagatgatgccgttgcagtgagtggagatgatgccattgcactccagcctgggcaacaagaggaaaaaaaactccgtctcagaaaaaaaaaaaaaagaatatggtaatttaagattcatatgttttatccatcttgaaaaataccttgtgcacatatttaaagtctttttacacattgacttatcttgggtctattgtatctgtctacattatttaagcaatgtaatcactaaaaatttaagcactgggttgagccttctggcatcccattagaatgcctggggaaacacacttcttgtcagttgcgtgcctgctgattggggaatgaaacacaaatattccagaatcaacagatttctttattttattttatttgtcacccaggctggagtgcagtggtgagatcttggctcactgcaaactctgccgcctgggttcaagtgattctcctacctcagcctcctgagtagctgggattacaggcgattgccaccacgcctggctaatttttgtagtttttagtagagatggggtttcaccgtcttggccaggctggtcttgaactcctgaccttaggtgaggaggaaatcccattttgtaaatcccaaagtcctgggattacaggcgtgagccaccacacctggcctagaatcaacagatttctaaacatactgaattacttctttcatattaattttcggaccttttcaaaaaaggaattggatatcctgttgatattcatattcatgttattattatgttggttttcatataatatgtgtaggactttatggttatttaaaaacctattatagactttttttgtttattatttaaaacttttttcagagggacttgttgcttttttttttttgagatggagttttgctcttgttgcccaggctggagtgcaagggcacgatctaggctcacgcaacctctacctcctgggttcaagtgattctcctgcctcggcctcctgagtagctgggattacagacatgtgccactcgcctggctaattttttgtatttttagtagagacagggtttcactgtgttagccaggatgttcttcatctcccgacctcaggtgatgccccctgccttggcttcccgaagtgctgggattacaggcgtaaaccacctcgcccagcctcagagggatttctggtaccagaattatagattgtttttgttaccgaacttcctaagttatgctcattctttgtttattaaggggagacactagattttttttttattaccctttttatcatcatagagaactttagtagtctacaagaatattattagaggcttagcagtggcctcactgcacatacatgtatatgtctttgggaacctacaggtttttaagaagttgttaaacttaatatttactagatatttgtttttggatggcatctaatatattaatagcctagaaaaaaggctccactaatgaatatgtcttggattacatagtgacatatattagcttttcgtccacatttgataacattgctaacattttctttttttttttactgaagctctttgaatttaaagttttctctcatttaaatttattaattaaaaacgtacctttactctgttccctttagcatttcaacctgatgttaaaagatgtatatgtgtgatacgtgtgtttgaaattttaactttcatcttggagtatttaattctctgaagcagtgcatgactcttgctcttcagcctcttgagggtgtccctggtttatattcctgatgatacaaaccctggaatttcttgtctgaagtgttaacacttaatttccaggccctaatttgattttaatagtggaagttcagattcaatgcattaatgacagattctacgttgacttcttcagatttgccagacagaaaaacctacttatgtgaggaaatcattaggctttttgactatcctctttgtataatgagacccttttctcattagatgagtaaaaagatccagagatgatcaccaatatcacccagaattcatatatatttaattgaaaagaaaacaaatcctgggattctttcctaaaaaggttgattacatttcttgcctgtccgaacgttgtataaacgtgaagaaaaataaaaatataggttttccagcactgggactatgaaatttgagatttaacatttattcattagtcagatttaaaggaatcaacctgaagtcgtagtttatattgtttttgaaggacctgagtaaggattctattaaaaatgattaattctgtcattatttgaaatattgataggattttaatatgttccttttttgagaatactaaaattataaattaacttacacttaatagcaaataggtcgtaagtatgtggtaatcaatttattgactaaaaattttgtaaaagataccttttatttaaagtggcctatcgtgtagttactatgatggtagtgctctctacattttcattgtaatcttactgaagaagtaaaaattaatcattattgttctccccactctaatattaattcaaaaatcataattgtacacatagggtacaacgtaatgtttatatatatgtgtgtaatgtagtatgattaaatcatgctaattaacatactatcaccttactttgcttacttatattttgtggtgaggcatttgaaatttactcttaattgtttgaaatacattattattattgctattgttatctctgtcttctctttgcaaataaatacatcattatttactatagccaccctgttgtgcaaagatttcaaaaactattctcctatgtgaaatttgttcccttttctttttcaaaaaaaaaaaaaatccacccgctgttttagcattggtgaagttaaaaatagaaccagtgtgttttagattcctctctaagtgtctttatttttaagaatggtttttttttttttttttgagatggcatcttgctctgttgcccaggctggagtgcagttggcaccatcttggctcactgcaatctccacctcccgggttcaagcgattctcctgcctcagcctcccatgtagctgggattacaggtgcatgccaccacgcctggctaatttttgtatttttagtagagacgggtttcaccatgttggccaggctggtctcaaactcctgatctcaggtgatacatccgcttcagcctcccaaagttctgggattacagaagtgagcccccgtgcctagctagaatgtgtgtattttaaaaagttaatccttcacagatatttatcttagggagaggctggtgtcatgaaaaaagctgtggactaagaatgggaagacaaagatcttttgtattggcactaccagctgtgtccctctgagggggtaatttttgccttttgaagacgttgggagggttaaagttcaggaaattatttttaaaactgtttcagtgaatatttagaaaaatattagtggagatagaattaattgctccgcagtggagtggctctctttctacattttctttttttttgagacgagtctcgctctgtcccccaggctggagtgcaatggtgcgatctcagctcactgcaacctccgccacccgggttcaagcgattatcctgcctcagcctcctgagtagataggattacaggcatgtgccaccacacccaggtaattttttttttgtatttttagtagagacagggtttcaccttgttggccaggctggtcttgaactcctgaccttgtgatccattcacctctgtctcccaaggtgctgggattacaggtgtgagccaccatgcctgccctccttctacattttctagtgtactcccattaggctgtaaacctatttcaagttgaacaataagaaatttcagcatagctctgcatcatcattttttctccatatcttgtattcacaccttaagaatttgttactagttgaaatgataagccagcaaacataatctaatctttgtgactatttgcatagattggagggcaagtacaatgtaaatggaatgtatatagagaaagggtaggttaaaaggtagcttatagcttgcttaccttttactacacagttggaatttaagaactgattcttataagaacaccagttgaacgatgaattgcttttttccctctggtgtagtgtgtatggctgtgtatatacatatttttattttaattttattttttaatgggaggagggaggatgccagaaacattgaaaggttgtattctgccaatgtgatagttttaagtacttgagggggtggagaagaaccacacgcatcttctaaacaaagatgggaaatatcatatcattataagaatgtatatacagtattaagcaattacaagattttgggccgggcatggtggtgctttgggagaccaaggcagggaggtgggtggatcacttgagcccaggagttggagaccagcctgggtaacatagtgagacctcgtttctacaaaaaataaaaaaattggctgggcatggtggcttacacctgtaatcccagcactttgggagtccgaggctgtcagatcaccgagatcagaaattcgagaccagcctgaccaacctggtgaaactccgtctctactaaaaatacaaaaattagctgggcatggtggtgcatgcctgtaatcccagctatttgggaggctgaggcaggagaattgcttgaacccaggaggcagaggttgcagtgagccaagatcacaccactgcactccagcctgggcaacagagcaagactctgtctcaaaaaaaaaaaaaaaatagctgggcatggtggcgtgagtttctagtcccacctacttgggaggctgaggtgggaggattgccttagcccaggaggtcgaggctactgtgagctgtgattgtgccactgtctcaaagaaaaaaaaaaaagattctggtactatttgaaattgtagtactgtaaatctataataaatgattgctgtctcttaaggaacttaatatctagaaacattgttttttttttcttgtaaaagggaattataaaagttacttcttttaaatcacttatgtcaatctgattaaagtgtgtttagtataaaatgtaacaaaagaaaaagatagggtttgtgtagactgtgggtttaaagtggcttaagtgatgattttgaagtttcctaggtgtcttatacttaaggctaaatacaaagacctcagtaaatttctggctactgctgagcatggtgggagcatcgtttcctgttcttactagtatgtttcagcagctagcaaaagctgtcttcatttaatacattttcctacagttaatagtgtgattatcttgaaaggcatcttcctttttcagtatttgatttgtgagaccatatcttctggaattacttgagacctctaattaaattgacgtttaaaattttttatttcattttcttttagagttggaggtcttgctatgttgtgtggactggcctaggatgatgatgatgatttttttctttagagacacagtctcactgtgttgcccaggctggtctcaaactcctgggctcgagtgatcctcctgtttcagcctcctgagtagctgggattacaggtgtgagctactgcagctggcttggcctaggattatttttatttttatttattttattttattttttcctttttttgagatggagtttcgctcttgttgcacaggctggagtgcaatgacgccgtctcagctcaccacagcctctgcctcccgggttcaagtgattctcctgcctcagcctcccgagtagctgggattacaggcatgcaccaccacacctggctaattttgtatttttagtggagacaggatttctccatgttggccaggctggtcttgaactcttgatgtcaagtgatccacctgcctcggcctcctaaagtgctgggattacaggtgtgagccaccgtgcctggccaggattatttttaaagagaagatttaacatatgtaattgttagaaaatcttataaacatgtcattccctgggaatgtgcttcaacctgttggctaaaggaactttatcagaataactacagttattatctattttcaggagttgaaaaaaatggttgcatacatttcttttttttttttttgaggcggagtctcgctgtgtcacccaggttggagtgcagcggcgtgatctcagcttactgcatgctccacctcccgcgctcacgccattctcctacctcagcctcccgagtagctgggacttcaggcgcctgccaccacgcctggctaatttttttgtagttctagtagagacggggtttcactgtgttagccaggatggtcttgatctcctgaccttgagatcctcccgccttggcctcccaaagtgctgggattacaggcgtgagccaccacacctggcccattcatttcttatattggtaaacatcacttcacctttaccttgattataaagtccctgtctatttttgagattctttagatttctgcagtgtgtaacttttttttttttttttttttttgagacggagtctcgctctgttacctaggctggagtgcagtggtgcaatgtaactcttagtgattcttaatcttcgttggaatgggctatgtttggccttttttttttttttggagactgagtctcactctgttctccaggctggagtgtagtggtgagctctcggctcactgcaacctccgcctctgggtaagcgattctcctgcctcagcctcccgagtagctgggattacagatgtgcaccaccacgcctgcctaatttttttgtatttttagtagagactgggtttcaccatgttggccaggctgatcttgaactcctgaactcaggtaatctgcctgcctcaggctcccaaacagctgggattacaggagtgatcaactgcgcctggcctatgtttggcatttaactggtcggggagggatgcatatctttgtacattttcagccttttttgtccttcatctattaaagaggtcatagagtaagatatttcctttcaatcttggcaatttcccaggccaaatgatatgtttctagggtacttccaggacttactgacaaaaggggaagataagtgatgcaattgagagctgaagtagggtctcttttttttttttttttttttttttgagtctcgttctgtcgcctaggtgggaatgcagtggcgtgatcttggctcactacaacctctgcctcccgggttcaaatgattctcctgcctcagccccctgagtagctgggactacaggcgctgcaccaccaggcctggctaagtttttgtgtatttttggtagagacagggtttcaccatgttggtcaggctggtctcgaactcctgacctcatgatccgcccgcctcggcctcccaaagtgctgggattataggcgagagccactgtgcccagcgaagcagggtcactttttaaggttgtaagctagcttgggttagaaataaaggcagagagccactccatacctgtagttctagctactggggaggctaaaaccagaggatctcttgagcccaggagttcaaggctgcagtgagctgtaataacacactgcactacaatgtgggcaacatagagtgagacctaattaaaaaataaataaataaataaatgcaaggagaaagtcatgaacttggtgcatttaggtgtacaattagttggcataaacgatttttttttttttgagatggagtttctctcgttgcccaggctggagtgcattggcgcagtctcggctcactgcaacctccgcctcctgggttcaagtgattctcctgcctcagcctcctgagtagctgggattacaggcgcctgccaccacgcccagctaatttttgtatttttcatagacggggtttcgtcatattggccaggcggatcttgaactcctgacctcaagtgatccatccgcctcagcctcccaaagtgctgggattacaggcgtgagccactatgccagccaagaatttttaaaaaaggagtttcactcagccgacctcattcctcagcagggcacctgtgtgcagggcaaaactgctcaaccctactcagcagccctgtgaaagctgctgaaaggatgagcagattgaggcctgaactgtatcttggatttagcagcctggaggtcataatggattttgccaagagtgatggggcagaaattggaccagtgtgtgttaaggagctagaagaagtgaagaaatgggagagaggagtctagacaactttagtttggctgcagcaagtaaaggcagattgtttgatggagggacatgtgggattgatggagtttttcctttttatatgtttttgtatttttaaatgggatacattgaaagtgttgcatgtttatgggggggatttagttcagtgggaaagtatttgaaaagttacagtaaggtggaagtagatggaatcctaagtaaggtctagaatcaggtgcaggtattttatggtatcttccccaccccaccccgagatggagtttcgctcttattattgcccaggctctggattgcagtggtgcagtcttggctcactgcaacctccacctcctgggttcaagcgattctcctgtgtcagtctcccgtgtagctggaattacaggtgcgcaccaccacacccagctaatttttgtatttttagtagagatgaggtttcaccattttggccaggctggtatccaactcctgacctcaagtgatccaccgccttggcctcctaaagtgcagggattacaggcgtgaaccaccgtgcgcagctggtacctttttttttgttggtgaagtagaatgtgtgtatggggaggggaggtgataggatattttggaatttgaagagaatgggaatgtctggatagtgcatgtatagaatgggaagtaaacactggaggacctgggagtatggtgcttgttgatggatcattgagtttatccaggactggggttttaccagatgggtgtgatgaaaaccttaagagttaagggtataggcaagagtgttgttgaaatgatacacaatgaaatctaagctggttaaagaagtgaggaaggggccgggcatgttgcctcacgcctgtaattccagcactttgggaggccgaggcggctggatcccttgaggtcaggagttcgagaccagcctggccaacatggtgaaaccccgtctctactaaaaatacaaaaattagccgggtgtggtagcaggggcctgtaatctcagctacttgggaggctgaggcaggagaatcacttgaacctggaggtggaggttgcagtgagccagtattgcaccactatactccagcctgggcaacaaagtcagagtctgtctcaaaaaaaaaaaaaaatgaaatgaagaaggaggagaatacttggattgggataaagtagaaagagtcactggaattaaagttaactaaaaaactcataaactttagaatggtattgagaaattgtaatgtgaactgaaaaagtctcatgggattttagagccaagaaggtcttgagtggcagttcctaccttggtaggaatagcttcagtggtgtgttgcaggtggaacccagattaaagtgggttaaaaagtaagtgaaggcaaggaagataaatttttcaacaggtttgtctgcgaagagtccaggctattagattgatagagggagaaaggcagttaaagggtttttttgttttttgttttttgttttgagtcagagtctcacactgttgcctggtctggagtgcaatggcgcgacctcagctcactgcaacctccacctccggggttcaagtggttctcctgcttcagcctcccaactagctgggattacaggcgcccaccaccatacccggctaattttttgtatttttagtagagacggggtttcactatgttgcccaggctggtctcaaactcctgaactcatgatctgcctgcctcaccctcccaaagtgctgggattacaggcgtaagccaccgtgcccggccttattttcttaatttttagatttattttattattattattgttttttgagatggagtctctctgttgcccaggctggaatgcagtggtgcaatctcggctcactgcagcctccgcctcccggattcaagcgattctcctgccccagcctcctgagtagctgggattgcaggcacccaccaccacgcctggctgatatttgtatttttagttgagacggggtttcactacattggcgaggctggtcttgaactcctgacgtcatgatccacccacctcggcctcccaaagtgctgggattacaggcgtgagccacttcacccggcctttattttatttttttttgagacagagtcttgctctgtcaccagactggagtgtagtggcatgatctcggcttactgcaagctctgcctcctgggttcaaacgattcccctgcctcagcctcccaggtagctgggactacaggtgcgtgccaccacgcgcaggtaattttattttttctattttagtagagacggggtttcaccattttggccagggtggtctcaatctcctgaccttatgatctgcctgccttcgcttcccaaagtgctgggattacaggcgtgagccgccgtgcccggccattttttgttttttgttttttgttttttttaaagtaagacttttgagagtgctcatatgttgatgatgtgataagcagtagtaaaatgggagattttgcaacgtacaaaagaaacaggccgggcacggtggctcaagcctgtaatcccagcactttgggaagcgaaggtgggtagatcataaggtcaggagatcgagaccaccctggcgaaaatggtgaaaccccgtctctactaaaatagaataaataaaatccacccgcgcgtggtggcacgcacctgtagtcccagctacctgggaggcagaggcacgggactcgtttgaaccaaggaggcagagcttgcagtatggcgagatcatgccgtacactccagtctgctgacagagcaagagctgtcacaaaggggatcctcagagtaacctgcagcatgaagcgtggaccgacgctgtgtcaccgtggatgacaaagcaacaacgacaaccaacgctgcgaaacacacgcttatccttcgagcgagagtcacataaacctacgccacatcacagcgagacacaagaggaccagaccgcaccacccgcatcataacagtaacgaaacatacgaacaaggacaaaatccagcttggaaaaaatactgacactgcccggactcaacggtcccaggtagnnnnnnnnnnnnnnnnnnnnccgggctcggtggctcaagcctgtaatcccagcactttgggaggccaaggtgggtggatcacgagatcaggagattgagaccatcctggctaacatggtgaaaccccgtctctactaaaaatataaaaaattagccgggcgtggtgttgggcgcctgtagttccagctactcgggaggctgaggcaggagaatggcgtgaatccgggaggcggagcttgcagtgagtcgagatcacgtcaccgcacttcagcctgcgcgacagagcgagactacatctcaaaaaaaaaaaaaaaaaaaaaagacaagacataccttggaaaatggggggaatagacagatccagatgatctctatggataggaggtttatttgttccattatgcgaagatgatgggaagaaaagctgtatgtgcagatgcaggtgaatttgtggatatattagaaggaagatgacaggcagtgatggagtgttgaagagctcaaacattagacagtactgggtctgagttctggctctgccttttacaagctgtgcaaccttaggccagttatgaaatcttactcatcaagttataactaataggattgtgttgaacatgaaatgacatgataaacgtatgtaaactgcttggatcagttgcccactagctcttgttaggagctaaaatgttagctcttgctgagggtgttgtcaaatggcttctacttctcatgaagcagaaatctataaggtcatccactggtagtggtgggagaaggaagaaggtgcagaaagttttacagatgttttggaaaggaaagaaacccggtgagggaaatgtgggcaacttcagaggcccacttgaagtcagagaaaaggagcactggggcatggatgtgagggggtactttcttcagcttttctctgaagacaattatgcatgtaaaacaaaggttaaaatcagatctactgccctcctggagttactggcttcgtttgctccttctggctaatttgattggaggtctgaaaatagagaatattagaggttccttggaaggaaaataagcaacactgaagtcaaatctttatcatgtttgctagaaatgttactaaaaaacaaaatttatggccgggtgcagtggcttatgcctgtaatcccaaccctttcggaggctgaggtgagtggatcacttgagcccaggagtgcgagaccagcttgggtaacattttgggaatgttgtagggaatgggacaaaaaaaatacaaaagttgctgggcgtggtggagtaagcctgtggtctcagctacttgggaggctgatgtgggaggtttgcttgagctcggattgcgccactgcactctagcctgggcgacagggtgagaccctgtttcaaaacaaacaaacaactttttttgagctacagtatatttaatggttttaaatatgagtgcagagtaagagggagtccagtccataagatgacccttgcatctaatactagttgcaagtttgggggttcccaagaccactcttttttttttttttgagacagggcctctctctgtcacccaggcgagagtgcagtggcatgatcacagctcactgtgccctgacctcctccctcccaggttcaggcagtcctcctacgtcagccacctgagttgctggatctatgggcgcataccacctcgcctggctagtttttctatattttttagagacagtttcaccatattgccaggctggtctcaaactcctgagctcaagtgatctgcctgcctgggcctcccaaagtgctggggttacaggcttgagccactgtgcctggccaagacgactcttaggttggatgatttgccaggaggactcactagaactcattgaaagctctcatacccatggttagagtttattgcagtttagggattcagattagaatgagccaagggtagaggtgcatagggcagagttcggggaagttccaaatgttggagtttcaaattgtcctgtccctgtagagttgtgaaaaatgataccttcctggtggcactggtgtgcgacaatactcatgaattattgcctaccagggaagctcactctgttttttatgtccaaagtttttactggggttccatggttgcatgcccatgtggctaaccttagtctccagccccactggaggtcaagctgatccatgtgactcaaagcccccaccataagtcacattattagactctgctgtggcctaaagcccccagatgaacaaggacaccttccccccaccgccacccccccctttttttttttggagatagtcttgctctgttgcccaggctggagtgcagtggcatgatctcagctcactgaaacctcagcctcctgagtagctgggattattacaggtgcccgtcaccatgcctggctaatttttgtatttttagtagagacaggtttcaccatgctggccaggctggtctcaaaatcctgacctcaagcgatccacctgccttggcctcccaaagtgctgggattacaggtgtgagccactgcttctggccaggaccctcttattaggtatgacatttcaagagtttagagattaccttccagaattcacaggtaaaagccagacctctccttggtgaagatacaattctttacaattttacaatagttaagtatatcttatcagtctatattggctgtttagttgacagacagttaaaaattggtgacagtccagatgtggtcactcatgcttctaatcctagcattttgggaggctgaggtgggaggattgcttgagtccaggaaattgagagcagcctgagcaacataatcagacacctgtctctacaaaaaacataaaaataaaaaattagctaaatggggtggcatgcacctgtggtcccagctgtttgagaggctgaacccatgaggtcgaggctgcagtgagctatggtcatgccagtgcactccagcctgggtgacagagtgagaccctgtctcaaaaaaggaaacaaatcacccataaatggataattaagatttggttattatagacacttaatactgaggtagttaaactagttttaccaataaattatattaatttaatatttcagtattgcaaaactgatgcatactcatttataattttgacatggaatggttctattaaatttgaacttaaagttctctgcaagaagagatttgtataataaattccctgagcctctcaaattaatattttagccatagactcatatttagagcagtgtttttaatgtaatgatacaaggcccagggttattcatagtttcaccctttctcttattcctcattaaagcatgtttgaatccaggtaagaggcattacaggggaaaaccttgaatttatttttgaagggtaaatcattttcaagtggtattaaccattagtatggaaagcaacatatcctataactgctctgtgacagtgagactatctttgctactttagagaataagtacattcctacttcattggctttagtgcaaatctcatttcctggtttatatccattataaattagatctcaccatgagagcaaaatcccttaataaacctaggtaaaagcaatttgaagtaatatgatgcttactccagtgacaccactaggtatggtgtttgcatcaagtcattttggggtgctttatggaaatacttcctagtagggaattccctgacttcacactttccagagatgacactctctctctttttctctctaatacttacaagaatggactgcaaggctacatttagtcaggcgataccatccccagcacatggtggattgttggtgtgaggtctaaggattctggtcatttgaaacgaatggcctcctagatttgtggcatttttctgtatattgagaataggtagctaaaataagtggtaactatatttgcatgtgatttgtatgttacagttaacatttaaattctcttatgtactaaaatttttttggttgccacattaagcctctttatcctgtaaggcacagagtggctttccacctcaatttttgctttaatgtatgaaccctaatgggaccatagttcaactaaaggcacctaactcatgaatgatatttgctccatgtttgaacaacaaatgttttaacccactgtcttcactaatattgtaactactgtcttacagattgacttgatgcaaaacatcacaaaggctccatattatacagtatgcgatttttgaggtatgagctttagaaacttacctctcatgtggcatgtacatcaggctttaacttcagtttgatcgttgtggggaaatttatgcatttctttttttttctctccatgatatttttagaatattaaaggggctgtagaggtatttttggatcattgctaggattcttagacttaacagatagattttcttttttcactaaattgagacactaattctggcagatgatatccctttcagctcttctaactaactagcctaacattcatgcctgcttcttggagttcaaatctgcagtttctattttgtggctttgattgcctcattttaagtgctcatttccgttctttaacagttttctatttattggactgggatgatcttgttggtgctaacagcctgacattgacattttttgaaacctaagtagtcaagattgtataaaaatagaaatttcatataaatgctaaagcattttgtgcttttaggttcagaatgcttacaacctgagttctggttggggatgctttgatcaatttgtattaaaataatttggcaactagggagtttttaggtatttctgagacagtggctctattccagttagtttttttttgttatatttctgaaaacacaaattttttttgggaaaaaaatctcagtgttcataacttaggggatttagaaaccttatttctaaccaacggggaagcggctcctggttttacagtttagtttgaaatcagatgcttcgtagttggaaacacattgttggtagcaacagattacccggtttcttcagtgaagtatttaagttgctctatattgactgtaaaaacttgtcttgattatattcatatactcatgaactgtttgtacattgtcttttagactggaaactgagtttattttgtattatggtcataataacttttaacataccctgcaaactaagcgtttctttataattcattatcttatttaagcctcacaacaaccttgcatgttaggtaggtatcatcctcattttatgcaagagacaaccaaggcttggagatcaagtaatttgtgcaaaggcacacatacttttcagtgctggagctgggatttgagcccagatctttttttaacttgtattctctgctgccttatggtactactgtgtcaccagaaaatgatacaaatatttaactcttaatagtaaaggtagtataggagataagtaaacatgatgaaaacaggaagtgaagatatgtttaaatattggcagacttcatttatctttgtgtttccgaattagtcaagtgcttattttattcgctcatctaataagagcttactgtggcatacatataaagttcaaactctgtcagaaaagattataagctctcttatgtttcaatctcctttcagaaagtaatcgtatgctatgatttatatagatgcatgttaaatgtgctatttttaggtacataaggaatgtcttttcattagtttaaaaaagttatggtccattgagttaatattttaatgcttatagacttagtatactcagaaaatattctcatacatttttcttgaaattccatagattttattttcccttatgttctaagtacttagctttatgaataaatgaactctgaatattagaagatactccttatggagccttagtcattttagtatgctaggttttgaatttcatgaagtttcagattgagatcctttataagtaatgacttgtaccagttagatatccaagtttaattggacctgttgtctgcattctgtattaacagtgattgcagtaagtgcagatcaaggtgtccaactgattgagctcatgctaagttttatgtttagtatttttggaagcaaggaaagactaataaactctaaacgaaatatatacagtatacaaacactgctgtcacttttacaccatagagggaggggcaaagcatagaggaatagcttagtgtctggccttgccagtgtcctaaacttttctaaaagattcaggttctaaaaggttgagaaagcatttttagtaaatatcatagaagtgattttcttttttttttttttctcaaagttgttcctctcaggagaaaatcagtaggggaagaacttacttggatttttcgtatgctataatagattattttgttgtcttctttcttgatagtttatgattgatggctgaaagagtaacactcatgagaagtcttgtaactcagctctgttttacttatgaggtagttgaagcgtagagcagatacttagatgaggacacacttttacccttggctgtaccctacttgtttactaataagcatcaggtattattctaaacagtacctgaattttaaatagattatgaactacaactttctgatatcactttattgcatttctgataccttttattttcttaaaatgtcttcttttttaatttttaaaattctgattgctactctttacaattaaggcatctgcaatggggtcttcaatactacagtacctaatcagtacttagaaaataacttggtaagacattgcccgtccctgacatgctgccagtgttttttatttttatgacaggaaaggctgaaattttttgactgattaaccctctccatgggggagaatttagaaagaattattcttattatcaagtcatgtgaggagaacactggaccagagtaaccaattgttctgttttgcctgggacaggagactttcaatggtaaaaccagcaaagtcaccctaatcccagtagttgttcatatttctgaatgggtctttagaacaatagaagagactgaaaagttggcatttcatccattgagaatctcttcccagtgaaagacttcttattagacagctgagtgcttacatataatatatagtacatattacactaaatagtaatggttaaatgtaaaatttgggagaagagaggcttgtataaagaaatatttatttatgttatttaaagttctaatcttaaacttttctctttttatagaactgatagtgcatcagccgacccagataatttaaaatattcttcatccagagatagaggtggttcttcctcttatggactgcaaccttcaaattcagctgtggtgtctcggcaaaggcacgatgataccagagtccacgctgacatacagaatgacgaaaagggtatatatattttcttattgctacaagcatgttttttgaacctacctgtctcaccttcctgccttcttatacccccaactttcttgctttcttctaatatatttaaaatatgaataacaaatgcagtgttatttctgaaaacctcataggacatttatccactttattatttttaaaatttaaaattttttccatacataattcataaatgcagttttcttacaaggaagatacaatactatttttgtttttattttcaaaaatatttagctaaggttgaagttcctcttggctactatctctaaacttcaagaaagttttaaaacaaggtacaaaatttgatttaatttagttttcatttctttgcttattttccaatgaagggatcaaaataaaattaatttaacttcaaaggtgtattaaaagaaatcaaaatgattttcaaggcagacagtacaggaaaaaggtaggagaagcaaaggctggttgagctgcagattgagtaataagatcctgagctatcaggaaattgactgaatgaaacgaacaatcatatttaaataacgtacacattgctgtttgtaggtggctacagtgtcaatggaggatctggggaaaatacttatggtcggaagtcgttggggcaagagctgagggttaacaatgtgaccagccctgagttcaccagtgttcagcatggcagtcgtgctttagccaccaaagacatgaggaaatcacagggtaaggctgggaaaacggggaccaatcacatacaccttccaaagacttgtatctcctcttattctggatgcctcttactaacgccttgcacaggcataagttgattagcctactgtgcaggtaaaaattgtttacattcatttcccactagaaaggttatagtacattttaaaagagaagcctcttaaaacaagattagaagactggataagatcttacagaaaaggtttacccaattatcgtggatattgaatgtatagtgcatagtaggctcttactacagcaagtccttgaactcttgggcctgtggaggatatagatatatatagagagggggtacttttctgtcttttttttttttctcttttaagttcagggtacgtgtgcaggatgtacaggtttgttatgtaggtaaacgtgtgccatggtagttggctgcacagatcatcccatcatctaggtattaaacccaccatccattaagctattcttgctgatgctctccttccccctgccccctagagtgggtacttttctggtttttttttttgttgttgttttcaatatatttttttgagacagtcttgctctgtcacccaggctggagcacagtgctgcaatctctgctcactgcaacctccgcctcccaggttcaagtgattctcgtgcctcagcctcccaagtagctggggttacaggtgcatgccaccacacccagctgatttttgcatttttagtggagacagggtttcaccatgttggccaggctggtctcgaactcctgacctcaagtgatcacgcgtgctcattacaggcgtgagccaccgggccctgcctagagtgggcacttttctaaagttaaatacactgatagcatttctgccttatgatgtagcctcactgtataggtgagtgccttggaagttcagaggattggccaggtgcagtggctcctgcctgtaatcccagcactttgggaggctgagacgggcggatcacgaggtcaggagatcgagaccatcctggctaacacggtgaaaccctgtctctactgaaaatacaaaaaattagccgggtgcggtggtgggcgcctgtagccccagctacacgggaggctgaggcaggagactggcgtgaacccgggaggtggagcttgcagtgagcttagatcgcgccactgcaccccagcctgggcgacagagcgagactctgtctcaaaaaaacaacaacaaaaaagaaagttcagaggattggaggtaatgataatttttttccttaaagagaaatttatcggtaaagctgagttatggggctttgtcagatgtaattactttttggacatttagtttttgacttttttttttttttttttaatactgtgtgtgtgctttgtgtatcttggtgaaaatctttgtgcctgtagcttttattgttggtatataacttttaaaaaactgatttctttttatgttttcacaagtggaatgaattcaaaggctatgctgtttgttaaaatagagtatttgaagcctgagacttatgatattatagaagctaaacagcgactctaaagtagttcagtaaacaattcctcttcttcaaaggctcagggtcatgtagtttgctagtgacagaattgtaagtagagcctaatttcccagctggtaacttgatgacatttttggtatctgtccttattgaaatactctatgggctagggatttgtaaaaaccctattcttctctcagacattgtagtttctttttttttaacttttaagttcaggataccagtgcagatttgttacattggtaaacttgtgtcatgagggtttgtagtatagattattttatcacccaggtattaagcctggtacccattggttgtttctcttgatcctctcccttctcccaccccctaccctccaaaaggatccagtgtgtgttgttccccttgtatttatttatttatttatttatttatttatttatgagatggagtatctccctgtcacccaggctggagtgcagtggcgcgatctcagctcactgcagcctccacctcccagattaaaatgattctcctgcctcagcctcccgagtagctgggattacaggagcgcgccaccacgcccggctaattttttgtatcttcagtagagacgaagttccaccacgttggccaggcaggtcttaaactcctgacctcgtgatctgccttcctcggcctcccaaagtgctgggattacaggtgtgagccaccatgcccagccttctggtttctttttttatcaatgttttctcataccttagaaatgaaactgtcagaccctttgtgatttgttgtttacgtatgtattggctaattatggtaaatagcacagttgaaaatgttttgcaaaaattgaggtttttttttgttttgttttttgagacagtctcgctctgtcacccaggctggaatgcactagtgtgatttcactgcaaccttcgcttcccaggctaaagcgatcctcccacctcagcctcctgagtagctgggattacaggcatgtgccactatgcccagctaatttttgtatttttcgtagagatggggttttaccatgttgcccaggctggtctcgaactcctgggctcaagtgatctgcctgccttggccttccaaagtgctgggtaattacaggcaagagccacctcgcccagcaaaaatctagtttttaaaggcatctttattatactcatagtattcactattgtttgcttgttcttgtgattaaaaaataaggggagaaaagttgtggtttgctacctttctagtggaggcatgccttgcatgtggtagatgataattagacatttgttgaactaaatgtgtgaaaacttcatcccagggaaatgatgataatgtgaataagaggctttcctccagtgggatacctagatgataagtagaagcctatatcctgtttttacttgattgagactttatccgtaccccttggaagttgtttaatttacctacacccaggctctttacctgcatgttgaaaacagtttggaatggacccaaagaaagttgttactaaggcctttcttttttctctcccagccagtcctctggattgaggtgttcggttggcctagggttattcatttcttgtttccttcagcaaatatttttttgagggtctgttatttgccaggtactctgctgggatctggaatatagagatgaacaaaagagtgataggacctatattccctgagcttttattgaccagtggactgtgacttttgatgtaattttatttttgagagagggtcttgctctgtcacccaggctggagtgcaatggggtgatcttggctcactgcaacctccgcctcacgggctccagtgattctcctgcctcagcctcccgagtagctgggactacaggtgcacaccaccttggctggctagtttatgtaattttttgtatgtctgtggagacagggtttcaccatgttgcccaggctggtctcaaactcctgaactcaggtgatctacccgccttccaaagtactgggattacaggcatgagccaccataataatttagttattatttaaataatttttaatttgaaaaatttaaaaatatctttgcttatttatactcaatggacaacaaaatgtttatatattcacagagagatcgatgtcttattctgatgagtctcgactgtcgaatcttcttcggaggatcacccgggaagacgacagagaccgaagattggctactgtaaagcagttgaaagaatttattcagcaaccagaaaataagctggtaagtatagtatgtttggaaatatgaggatttttgtgtttccataataaactaggtaatgctaccttgagtagtttaagaatggggaaagtctgtattatgatgatcgagaacttaatgctctctaatatgtaatttctttttcttcttaaagacaagatcttgctctgtcgcccaggctggagtgcagtggcacaatcatagctcactgcagtctcaaactcctggattcaagctatcctcccactgcagcctcctgagtagctgggacttcaggcatgttccactacacctggctgaggtggaagaatcacttgagcccaggaattcagggttgcagtgagatgtgatcacacctctgcatgtcaacctgggcgacagagggagtccttgtctcttaaaacaacaacagaaatgtaacaaagtataggaagggttaaatttttttcttcactttctttacaccaattaagaacttgatatgggccaggtgtggtggctcatgcctgtaatcccagcattttgggaggccaaggcaggcggatcacctgagttcaggagttcgataccagcctgcccaacatagtgaagccccatctctactaaaaagacaaagttagctgggcgtggtggcacatgcccgtaattccagctacatgggaggctgagcaggagaatcgcttgaacccaggaaacggaggttgcagtgagctgagatcatgccattgcactccagcctgggcaaaaagagtgaaactccatcttgaaaaaaaaaaaaaagaacttgataatgagcaggagaaaattaatgaaaatggtctagtgaggcagatgacacttggatcaaagcaagtttctcctccttccaaattttattatgagaaggttcaaatatatagcaagttgaaagaatttgacattgaatctgttaaacccgtcatctaatttttgtcgttaacattttaccctaaatactgccttgtcacatgtctctccatctatccctccatccatcagtcaatttttcaaatggatttcaaagtaaataaaacaagctttttgagtttatttttttgttgatgatcacagctctgtgtttccagtgggtgaatttctttcatagtctgaaaggaaacatgacattcctgatacatgctcattggggagtgggaataataaagaaactaaagtactgttgaattagaatttggaggggaagacaagtaaaaaagtacacaatgctattcttaaaagtataggaatttgaagtttttataaatgtgttttcttttaaaggtactagttaaacaattggataatatcttggctgctgtacatgacgtgcttaatgaaaggtaagtaactaataatggttcagtttaaatgactttaaaatatatttttagaaattacttaacaatacacaagaagacaaacccactggctttgtttatgaacatctattgacatttcagtgggtcttgtcatttttatctgcattaattatgtgttaattacggttgaatacaaatggaatccacttgaaaagaatactttatttattttttgagccggagtctcaccctgtcgcccaggctggagtgcagtggtgcgatctcagctcactgcaacctccacctctcgggttcaagtgattctcctgcctcagcctcccaagtagctgggactacaggtgtgcaccaccactgccagctaatttttgtatttttagtagagacaaggcggagcttgcagtttcaccatgttggccaggctggtctcaaactcctgacatcaggtaatccacccaccttagcctcccaaagtgttgggattacaggcatgagccactgtgcctggctggaatattttattttttttaatttgctagtctcactggataaccgagtcttgacttatggaatggcataaactcttgatgcaggcatgaatgaataaaattagtttttgtaaactagagaatttgaaactgcttggagaatagaggtaaaaaggagtttccttctttgggtaagagtggatccaaatcatatattctctggctattagagtctccagaggtgtgtggtcatttcttgttatggtgattcccaaagatttgcagtgttggcaagtacccaaaatttatctcagctggtcataaaccttagtgccttttgatggttttattttatagagttactcattactgttatccttttaagtttctgtatttaactattaccattttttattttatagtcattacatattggatattatgtagaatgtagttatgtatagtgtgttttatctaattatttgttgctgcccttttctgagagttatttaatacagtttgagatggaatttagcatttttgggccttccctcactgtttgtaaataattgattttgtaaaaagaaagtaatatcagacagatacttgagggcaatgcaggctagacagactgtagtatttagagtggagaaaatttcaaccttttatgtagtttgaatagaaatttaaaaaaccacttaagacattcttttgtaagatgtattactcgtgtcatcatagaaaacttaagccttttgtgtgtgttttttgtttgcattaaaataaacacagtagcaaattgcttcaggagttgagacaggagggagcttgctgtctcggccttctttgtgcttctctgagctatgaggctgagaagatcttcaagtggatttttagcaaatttagctcatctgcaaaagatgaagttaaactcctctacttatgtgccacctacaaagcactagagactgtaggagaaaagaaagccttttcatctgtaatgcaggtaagaatgaagggggaaaaaatgcatgatatacttgggaagaaaattgtccctttaacacatgtccttggaggggagcttgaagaagggaatcatagaataggggttatctactgataggaaatatgttttaaaaattcctctttctcagtttgagtaaaggatacactgttcaaggatcagtgctacatacatatatgcatatatgtggagaaagagggagagatttcttctaagaaattggcttacacgccaggtgcggtggctcacgcctgtaatcccagcactttgggaggccgagcaggcggataatgaggtcaggagatcgagaccatcctggctaacatagtgaaaccccatatctactaaaaatacaaaaaaaattagccgggcgtggtggtgggcacctgtagtctcagctaattgggagactgaggcaggagaatgccgtgaacctgcgaggcggagcttgcagtgagtcgagatcacgccactgcacttcagcctgggcaacagagtgagactgtgtctcaaaaaaaaaaaagatacatgttgaagttagatttgaaataagttagttttaagatttttttcctcagccaagcgtggtggcctatatgcctataatcccagcactttgggaggccgaggtggaaacatcatgaggtcaagagatcgaaaccatccaggccaacatggtgaaaccccgtctctactaacaatacaaaaattagccaggcatggtggcacgcgcctgtagtcccagctactcaggaggctgaggcaggagaatcgcttgaacctgggaggccgaggttgcagtgagccgagatcacaccattgcctgggcaacagagccagactctgtctcaaaaaaaaaaaaaaaggatttttttcctctttggtttttagaaatgtttttttgagattgcttaggaccagaatgatttgcaaatttgaaaataggaactccactaggaatgctggatagaagagtgcttcacatttgtagagggagacaagaactaaatatcacaacttctttctgagccttttggtttgctaacgtgccccaaattcttattccaaatggtataagataattatgtgtaaatgaataccagctctacttagttttatttcacatttgtgtatctgaatatattagaacatcattcctttttttttttttttttttttgatgcagagtcttgctctgttgtccagcctggagtgcagtggcatgatctcggctcactgcaacttctgcctcccaggttcaagtgattctcctgcctcagcctcccgagtagctggtattacaggagtgtgccactagcctggctaagttttgtatttttgatagagatggggtttcgttgtgctggccatgctggtcttgaactcctgacctcaagtgatcctcctgcctcggcctcccaaagtattgggattactgtcatgagccaccacacctggcctaaaagatcattgatttagttttgagtaagattttaagtgattaaattatagtattgatgtgttcggaatatctgatattagggttttttttttttttttttttttttactgtttttgatatgctttattttgggtatgtagtttaaaaaatataaaggaaatataaggaatgttcttttttttttttttttttttttttttaaataaaaagtgtatttttaactgggcatggtggctcactcctgtaaccccagcactgtgggaggctgaggctggtgaatcgcctgagtccaggagtttgagaccagcctgggcaacatggtgaaaccctgtttctattaaaaaaaaaaaaaaaaaaaaaaaacaaaggaaaaaaaataagtcgggcgtggtggcatgtacctgtagtcccagctacttggaggctgaggcaggaggattgcttgtgcctgggaggttgaggctacagtgagctatggtcaagctactgcactccattataggcaaccctatctcaaaaaaacaaaacaaaacatttttccccttgattatagaggtttgagaaaaatttgagggaagattcagaaaattacctgtaactaaacagaatgccaccagctcgggcttattctgcatgcacaattatgaacattttcccagctcttgtgaaaattctcacattcatagaaagatagatgcaccagtattaaataaatacctgtaaatatgataataatttcataatatatgcttcacctagatttaccagttactaatattttgccacagttttattttctcacacactttgttgagcatctgaaaaccatacacatgatgacagttcaccccataatgttttagtatgcatctcccaagaataaggtttttcttctgtataacaggaatattgtaatcatacctaagtaaatgaattttattacatatgtgttctatattcaaatttctgtaattacccctaagatgtcttttaaatgatttttagcattgatagtctgtgcctgtgtagattataacattggttattgcaaaataatggttttctttttctctttttttttgagacataatcttgctctgttgtccaagctggagggcagtggcacgatctcggctcactgcaacctccgcctcccaggttcaagcagttctcttgcttcagcctcctgagtagctgggattacaggcatgtgccactgtgctctgctaatttttatatttttagtagagacggagttcatcatgctggccaggctggtcttgaactcctgacctcaagtgatccacctgcctcgtcctcccaaagtgttggggttacaggtgtgagccactgcacccagcctaaaatgatggttttctgattctagcatttcttttataagattgctatgtaaagcagagcttttccttttttagggaaaaatgttttctaacagctgcaaaataaatattctttcaatggaatgacaaataatgatttattattttatttttgccctatatttattttaaaaatttatgtataatggtaacctgagcctgcatgttatttatgtgtggtcccatactgatcttctttaattttaatatgaagcaagtactaatatactaaagcatagattatataaaatttgctttatattttggattgcaaagtaattgttgtactttatagaaaagtttcccaaatccattttacttttttgtatttgaaatttaatcacaggtagaatcttaaagagagcatttagggatattgtaaacagatgttattaaggactaatgttaactgatgtcaaaggactaatattaacaaacattgaagaagagaaaacagtatttgtttttagcttaacatcttagtggagtgaaatattttcaatttattttatttatttattaattattattttttttgagatggagtctggctgtattgtccaggctggagtgcagcagtgcaatctcagctcactgcaacctctgcctcctgggttcaagcgattcttgtgtctcagcctcccaggtagttgggatttacaagtcaattttttttttttttaactaaaactacagaatctatttttcttggtctcatattcagttttttatgtagtcagtaaataatgaacctaatttgcttgttttctccctattttgttgaatgttcacggtttgtaactttttatttttaagcttgtaatgaccagcctgcagtctattcttgaaaatgtggatacaccagaattgctttgtaaatgtgttaagtgcattcttttggtggctcgatgttaccctcatattttcagcactaattttagggtgagttcctcattccgcttttcagatcatggggtgagggggatggttgtgtgtgtgaggatctgaggaaacagatggaaaacaatgcctcagctcctttgaatataatcagtgatatttgaggttccagggttaaataccgcatttttctttctgacattcataccttaaaatatttgaagaaaataaactatttcattgttgtcagaaatgtagttcttttattttcctgcccctctcccctttctaagtttctagaatgtcaagtaggtagaacatagatgctccttttaggatcttttgctgtgaaatggtccacaggtgaatggcagtaatatcttaaaatgattggccccctctctctttgtttccatcaaggatacagttgatatattagttggatggcatatagatcatactcagaaaccttcgctcacgcagcaggtatctggtaagtcttgcagcctataccagttatttaaatactgtcggggaggagcagtggtcccccagtgaccatctatcaataccatttctttaataatgcaagaaaactaattcagagaaatgttttattgtaaatgaacattacttgttagctaaatatgtattttcagaggaaattactagtaggtgggtacagtaagtacagacaggacttacccaagttatttgtagtttgtactggtaggaaagtgtatggtaagaatatattgtagtggcaataccctgaagtggacaatggaagatccaagttatttgtcacattttattgtttttctggtaatttttttaaaaaaggaaatacagggttaatttggagaattgtcataaatgagaaatggttttgtttcccatttttttggagtttaagtgaatgactaacgtggctcatttgcacatttcagtttgtttcaagtgtcatagtttctcgtaacttacatggtgtaataaacttttgaaaataggatattcaggtgatagtggcctgtttcattttcactgaggagatgagtatacacctttaatggttagatgtggccctgggattagctgggccaatggtagattgtggcagtttagtcttaagtcatgtgtagtgacaatatagatatgaaatttactgaaaaagtaaggaaataacatttacctgttaatttctgcagaaattaaagaggtattaattaaagaggtattggttaattgtgatcagcatgtttaacagtcttaattttatgatataggacatgttttagggtatgctgcttgaaaaccagatacctcttaaaacaagcctcttatttttttttaatttggattttttggtgtttttttcccccctaccctttcacaatttcttatacgattccaagggtggttgcagagtttggagccattttgggtagctgatcttgcattttctactactcttcttggtcagtttctggaagacatggaagcatatgctgaggtgagtatatagaaagctgtttcttaaaattttggttaagaaaaaatcttaaattgtgctagatttattttaaaatggctcagacctcctgacatttaagcagaaattacatgcccattgcaatattttaaacatttttttttttttttttgagatggagtctcgctctgtcacccaggctggagtgcaatggcacggtctcggctcactgcaacctccacctcctgggttcaaatgattctcctgcctcagcctcccgagtagctggaattacaggtgcccgccaccatgcccagctaatttttgtatttttagtagagacagggtttcaccatgttggccaggctggtctcaaactcctgacctcaggtgatccacccgcatcggcctcccaaagtgctgggattataggcgtgagcccccgtgcccagtcaatattttaaacatttatttcagatgtgtttaagttaccaggagaattactggagagactaaaagaaacgttgcaagcttcgtatttcgcaaagctttacatactcttggtagctggtatttttctaaagacattttttgttatttatttttattttttgttcccggtcttcagagtcttaaagcaaattgatgtggtgttataaaaaaacacaaaacaccaaaagcccctaaagattttcctcttacatatgtacaggagatcttgaatcgtactttggaggacaagccttggctttagccagcttttgtggctgtacgaatatagcataggagctttaagagcgctgctgaagcctctgttactggcacttggcttttctggccccactgtcgtggcttaactctgtgccatctcttatctgaatctctttgtgtttctcccctattcagatcaaccaatcaaggctcccataaagattttagcctcattttgtttttttcatctttcctgcttgtagtcgacaggaattcagtacctttagctgtactgatttgtttactctttcctagaaaagcaaggaagtgtttcgcttctgtgttgttttttctttgcccccacacctagaacgtctttttttcacagcccacgtttaaagctgatttacctctcataagccacacattctagtttgtagagatgcttccccttgttatccttaagatctcattctcttctgttattttgctgcttaattttaggtagatgcatacattggttctagtatcccagtttttgcgaatcttgtccttttcatatatcgtacttcttcaattacacatctgtagaccaggtcttgtaatctccctttgctcttcatgtgcatgctcttggtttggaggacttactgttgagctgagtggctcaaagaatacctagaatgagatttttagccaaaaactaattcaggagtggcaaaagcttccgtcttcatttatacctacatataactagagcatatgtgctagaatttatttttccctaacagctttctgagttgatttaagagattatttctttaatttgttgtctgttgggtttaatgttggctttttgaaataattaggtaaaacccatttttatatttagagtcatgaatattctcatgggccacagttctctttctaaaagcctaaaaatctattctaaaatgaattgattgaaatattttagagttttttttttttttatttaaaacaatgtactacttattaagaatgctgtgaattcacatctaggacctcagccatgtggcctctggggaatcagtggatgaagatgtccctcctccatcagtgtcattaccaaagctggctgcacttctccgggtatttagtactgtggtgaggagcattggggaacgcttcagcccaattcggggtcctccaattactgaggcatatgtaacagatgtaagtgcttttgggcatttcaagtgtcattcaaaaataaaattgttttacactgtaaatgcttctctttacctggtgaactgttattaatccttcatttgtttagcatgtatgtatgtatgtatatatgtatatattgtctgactgttttcttgaataactagaaaagtagggaatcctgttatatctcatcctcctttcatccaactcccctaccctcccatgacaaaaggccactctgaatttttaaatcttattctttcgtttttaaataatatttattataattttacttttaaattattgggtttccttttagtttttcagcatactacgaatagcacactataggaaaagcctcagaaagtaatcttctctgaacataagatggaactcatatgaaaacttgtatacctttatattctttgatagcctgatatcaaagaacataaacaaattaaaaatgaggtagctagcttgccacacttcagcagcctcaaacattagctgcactgtatgtagcacatccaatgagggttcagtggaaaagacacaagaaatgaaccccaggcattgtactctgctttgaataaggagaaagaagcatgtgtgatatagtcataaaagatttaatcgaactgatgaaaattttactgttaggataaaacttgcttttaggagcatatacttttgctgaacacgttgctagataaaataggatattgattatgtagatatataaaatttttagtaagttgcgtacttgagcagaaatgtcagaacttaaatgaaaccagcatattggtattttaaaccaatatggtttcaaaatggtttaatatctttgcttcatttttaatatctaaaaggtggttgtttgaagactgtacagagttgaaataaaaagccattacttcagacataaaataaaagggacataatttataggataggtgtatattgatttatgaggatcttttaggcctttgagaatggtagaatggtggttttttttttttaaatttaatttaatttaatttttttttggagctagagcctcactctgtcacccaggctggagtgtagtagagcaatcatagctcactgtaatcttgaactcctgggcccatatgaacctcccacctcactcagccctacaagcgagtgtcaccatacccagcttttttttttttttttctttttaaagtggggtggtgccatcacgactcagtgcagtctctatctcttgggctcaagtgatcttcccactatagctcctgctaattttttatttttgtagagatggggtctcagtgtttcccaggctggtcttgaacttttggcctcaagcagtcttcccacctcagcctcccaaagtgttgggattatagacatgagccactgtgcatggccaagaatgcttccccctccgcgcccccccccccttttttttttggagacatggtctctgttgcccacgctggagtgcagtggcacgatcttggctcactgcagccttgacctcccaggcttaagtgatcctcccacctcagcctctcaagtagttgggactactggtgcgagccaccatgcccaactaatttaaaaacaaatttagtagagatgaggtgttgttatgttgacatggctggtctcaaactcctggactcaagagaaccttccagctaatcctgtcaaagtgctaggatgatagatatgagtcactgtgcctaacctccaaggatacttttaatgaaaactatgggtagactaaataaaatcctgtatgtattggttgttaaatattatagaaatattttttaacatttgctctgttttctcccctattttattagaaatttagtacacaattattggccattatagttaagtgggggattttgtttgtgtgtgtattggaaataatatgatttttgaaggtattatgtggtaagcatgagagtgcttatctttcaaaagagaccatcagtagatagaaactttaataagcttaaagtgacttgtctgtttagttttaaaagattgattcccaaaagcccaagagctagcttgtagtatgtgtgggcaggctattcccatgctgtcaataccattactgttgtggtggtgtatttcatgataaagattctgagcttccgccatttagtgacattgggagaaacgaagttgggtatatgggaaatagaggatggcagattccatttcctgtcataatagcactttaggattttttagccaagatcatgtttacatactgtactaaagatatcattattattcaactactgagaactagaatattaagagactgctggcaaggcaagcagttaattttcagttgaaattgcattaaataaaaagtattttcttgctttgtggaagcacgtgaatttttttaaaaagctgcttgttttccccatttacaggttctgtacagagtaatgagatgtgtgacggctgcaaaccaggtgtttttttctgaggctgtgttgacagctgctaatgagtgtgttggtgttttgctcggcagcttggatcctagcatgactatacattgtgacatggtcattacatatggattagaccaactggagaattgccagacttgtggtaccgattatatcatctcagtcttgaatttactcacgctggtatgtgaattattcttttcctttttaatgtgttggtttattcaggcccttaaatcgatatgtaagaaattaagggctttgtctgggcatggtggctcatgcttgtaatcccagcactttgggaggccaaagcagaaggattgcttgcatccaggaattctggcacagcttgggcaatgtagtgagaccccatctgtacaaaaagtcaaaaattagcttggtgtagtggcgtgcacctgtagtcctagctactcgggaggctgagggaggaggatcgattaagcccaggaacttgaggttgaagagagctctgattgtgccactgcactcagccaaggtgacaaaaaaaggccctgtctccaaaaaagaaaaaaaaataagggctttgctttattatattattttcttagagtacattcatcagttataatctgtgctttcattttagtgtctatttacttttatttttaatgcaatttttttttgagacagggtctcactctgttgcacaggatgaagtgcagtggcatgattttggctcactgcagccttgacctcttgggctcaggtgatcctcccacctcagccccccaggtagctaggactacaggcgtgcgtcaccacacctggctaattttttgtattattttgtagagatggagttttgccatgttacccaggctggtcttgaattcttgggctcaagcaatccacctgccttggcctcccaaagtactgggattataggtatgagccactctaccaggcctctatttttactggttgatagctagtctcagtgtagctttacttgtgttttttgaggaaacattgctctatgcaccagattctttcttttttttcttttcttttcttttttttttttttgtcacaggatcttgctgtattcccctggttggagtgcagcggtacaatcagagctcactgcagcctcaaactcctgggctcaagtgatcttcccactcagcctcccgactatctgggactacagatgcatgccaccatgcctggctaacctttgtattttttggagagaaggggtctcactacattgtctaggctggcctcaaattcttggtctcaagtaatcctcctgccttgccctcccaaagtgctgggattacaggtgtgagcaatcatgcctggcctcctttaatttcttttttttttttttttgttgagacggagtctcgctcttttgcccaggctggagtgcagtggtgcaattgtatttttagtacagacggggtttcaccatgttagccaggatggtctcgatctcctgacctcgtgatctgcctgccttggcctcccaaagtgctgagattacaggcgtgagcaaccgcgcccggctggcctcctttaatttcttaaccataaatatcctcccctcacttttattatggacattctgaagcacataaaaatagggagcatagtataataaatttgtacatatttaacactcagcttctataattagaaacaaatggcccatctggtttcatctaggcctctttgctatcctttcatctccaactggagtattttaaagcaaattctagatgacattctgctgagcatttctgccagaattacacctctttttactaatgtgaaaaaatgcccatgataactgtaaaatacgtgtgtcctatttaggtgtctaaacactttaatgtcacagtattaaggccttaaaatatagcttagatatatttttctaaattaaaagactattttttagatatacagaaaattgagcagaaaacaatgagttcccatataccttcttcatcccaacagtttccccctcattaacatattgtgttagtgtggtacatttattacaaaggagcgaatatggatatattattattaactaattttatagtttactttgtgttatgtattctatggactttaacatgtgtaatgacatgtatcccctattaccagtatcatacaggatagtttcacttccctaaaaatcttttatgttccacccactccttcctcgttccctctccccactcctccctccctccatcttaagcccatggcaatccctgatctttttactgtctccgtcgttttgccttttccagaatgccatgtagttggagtcatatagtatgtagccttttcaattggcttctttcacttatcagtgtgcatttaaggtttctccatgtctttttgtaattggagaagctcattttttaaaaattttattcttttagattgttgaacagataaatacgaaactgccatcatcatttgtagaaaaactgtttataccatcatctaaactactattcttgcgttatcataaagaaaaagaggtaagtaatacattgataatgaattttgacaacttgagtcactgaagagttggacctaatgttgcttaccaggctgtataagtgaaattgagtgaaatgtgaaatgtttgatttagaatatagtgattgtatttgttcttttaagtttgtatttcttgagaatcatactgaatactttcatgaatgatgtgccagatactcttttcagactatgcatcttttgctgttattaaatttattataaatttattataaatttaaattttcataagggtaaaacaagttgacacatttataacgttataaattaagaagtactgtatattttgtaaacaaaaatgactggcttttcaaccaccccctagtcaaatccaccacagactttcctggtagatttaagaaacccagtcttaaactgctgtttgcatatgtcttctgatgttgattatttaaaaaaaaaaaaaaaacggccatttcggaaatttcatattgacagttttcatttatagtactctgtatttgtgataaaactttatagacttgaaatagcatactgatctgtgtcagttttctgactggtttttaaaaagttaaaatattaagtgctacggacagtgaattgatcgatcttaaatttatttgtatcatcagcactaatacagatagtgatttattttccatataattttagaagatttattttccatttatcacttccttgaattttttgtttttcaggttgttgctgtagcccatgctgtttatcaagcagtgctcagcttgaagaatattcctgttttggagactgcctataagttaatattgggagaaatgacttgtgccctaaacaacctcctacacagtctacaacttcctgaggcctgttctgaaataaaacatgaggcttttaagaatcatgtgttcaatgtagacaatgcaaaatttgtagttatatttgacctcagtgccctgactacaattggaaatgccaaaaactcactaataggggtgagtctttaattgtaatgactttgttttatccacagttaagccttttctcattacatatttatgtatttcactgtcatgtcaagatgtctgcagaatcactgtgtgtaacaaacagccatatttaagacatgcctggataaataaaattggtaggaatgttttcttggcattatatttaacttttcttcttctttttccttgacaaatcttgataagtttttttatattagttttattttctagaaaatgtcttatgaatttctcctatttgctctagcatgcttatagaaaatgtcagtgtttcttacagctcaaatttgtgtagttgttttaaaatgcggtctctttcttcttcccctggtacttttttctttctgtctactgaagttagttcttatacatggtcttatattttggctgtctcttttccctaggaacattcatacaggttgaatattccttatctgaaatacttgggactggaagtgttttggattttggattttggaatactttttttttttttttggagatggggttttactcttgttgcccaggctggagtgcaatggcgcgatcttggctcgctgcaacctccgcctcccgggtacaagcgattctcctgtttcagcctcccaggtagctcggattacaggcatgcaccaccatgcctggctaatttttttgtatttagtagagatgggttttcaccatgttagccgggctggttgtgaactcctgacctcaggtgatccacctgccttggcctcccaaaatgctgggattacaggtgggcaccaccatgcccagccggattttggagtattttcataacacttactggtgagcatccctaatctgaaaatcctaaatctaaaatgctccaaaatttgaaactttttgagcaccagtatgatgccccaagtggaaaatcccacacctgatctcatgtgatgagtccaaactgttgtatgcacaaaattatttaaaatattgcataaaatgaccttcaggctatgaatagaaggtgtctatgaaacataagtgaatttcgtgtttagacttgggtcccatcctccacatatctcattttatatatatgcaagtattctcaaatccaaaaatatacaaagtctgaaacacttctggtcccaagcattatgaatgagggatactcaacccgtagtctttcttttaggggaaaaaaaaaaaaaaggcttttttttttttttttttgagacagagtcatgctgttgtcgcctgggctggagtgcagtggtgcaatctcggctcactgccacctctgcctcccgggttccagcaattctcctgcctcagcctcctgagcagctgagattacagacacctaccactacgacgggctaatttttgtatttttagtagagacttggtttcaccatgttggccaggctggtctcaaactcctgacctcaggtgatccacccgcctcagcctcccaaagtgctggaattacaggcgtgagccaccgcgcccagcctgcttttttttttttttttttttaagtaattcgacatggccctgctcttgatttgtatttattgtttatggtttgtgtatttcttcttcctattggaccacacagagttgaaaaacattctttttaatagaaagtaataggtgtgggctgggcacggttgctgacacctgtaaacccagcactctgggaggccaagtcgggctgatcacttgtggtcaggagtttgagaccagcctggccaacatggtgaaacctcgcctctactaaaaatagaaaaattagccaggggtggtggtgcacacctgtaatcctagctactttggaggctaagttgggagaattgcttgaacccaggaagtggaggttgcagtgagctgagatcacaccactgcactccagtctgggcgacagaaccagactctgtctcaaaagaaaaaaaacacaaagaaagaaagtaatggacataattagggaataaagtttttaggaggaaaaaggtaaaacttgatgtttgcgcttacatgtgctctgggttgtttgattggattgccttgtataattccatagctgcttcgcttattaccagttacagcttatgtttgaagtcacaataaattcttcttcgaacacgaaagcttgatttttgaggaattcacattatttacagattcagagatgtttatgtcctgtactctagaaataaggagaaagtgggtggggatggggcagtcaggtggaatggagtgtcttggcagtgtaaaggaaaaagatggatggaaaaggtgtagagtggcagggtgtgcctttgtttccttattgaacagggcaccttgccatttgcagtatatggaaaattgaggaaatacagtctacttccgcaaaaggcacatacagagggctttgtttagaccagagatcggcaaactatggtccatgggccaaatacagcccagcacttgttttttgtttgttattttaaatgtataattcactgatttttagtatattcacagaagtgtacaaccatcacaacactagcgcctgtttttgtaaagaaagttctcgttgggctgggcgcagtggttcacgcctgtaatccctcgggagaccgaggggggcagatcacctgagctcaggagttcaagaccagcctggccaacatggtgaaactctatctctactaaaaaaatacaaaagttagcagggcatggtgatgggcgcctgtaatcccagctacttgggaaactgaggcagggagaattgcttgaaccccggaggtggaggttgcagtgagccaagatcgcaccattgcactccagcctgggcaacagagcaagagactctgactcaaaaaagaaagttttcttggaacacaggtactctcattcctgtgttttgtatgtggctggtgttttttgttttgttttgagagagagagtcttaactttgtcatctaggctggagtgcagtggtatgatctcgggtcactgcaacctctgcctcccaggttcaagcgattctcctgcctcagcctcccgagtagctgggattacaagtgtatgccaccatgcccagctaatttttgtaattttagtagagatggggtcccgctgtgttgcccaggctggtttcaaactcctgggctcaagtgatctgcccaccttaccctcccaaagtgctaggattacaggtgtgagccacaacacctgacctgtggctgttttcttactgtagcgatagacgaggagttgctgcattgcatagagatggtatattgcacgcaaaggctttactgacttcataaaaaagtgtttgtcccaggtttagtgtactagatcccttgcaatctgtaattttaatttaaaaatgtccagatacccctattttgaaggataaactctgtatgcttgtgcttattttggagaagccataaacttactttgttttgtacatgatcagatgtgggcgctatctccaactgtctttgcacttctgagtaagaatctgatgattgtgcacagtgacctggctgttcacttccctgccattcagtatgctgtgctctacacattgtattctcattgtaccaggtactgtatttacaaatttttcttaagaaccccacaaaacatttttttttttaatggatagattttaaagatgtatgttgatttaactttggacttgcttgctttctttgattaaagatgaaaagataatctgtgctttgtctttcaggcatgatcactttatctctagtagcctcagttcttcctctccttctttgtttgatggagctgtgattagcactgtaactacggctacaaagaaacatttctcaattatattaaatcttctgggaatattacttaagaaagataaccttaaccaggacacgaggtaacagatattatatagtattaactattcctaactttgttaatttgcctttataatttgagaataagaaatgtggattacaaaaaatttttaaaaatgtggattatagaggtgaggtagagcagcttctttattgtcaaacaccttataatttggttttattatttaatctaggctttcttattctttctgaaaagaaatacatgaaaaacctcactcccccaccccccagtgtttcatagaagaatatatatagatttttaatattctttgcttttttttttgagacggagttttgctcactgcaacctctgcctcctaggttcaagcaattctcctgcctcagcctcccaagtagccgtgattacaggtgcccgccaccacacccagctaatttttgtatttttagtagagatggtgtttcaccatgttgttggccaggctggtcttgaactcctgacctcaggtaagccaccacacccggcctctttgctattatcatgctgcgttgggaggttttcttaaaaggcacacaacaattttgacagtaatttctatagtttcatttttttatttttattttttattgtttgagatgtttgaaaaaccaagagaagaccaatgtaagaagactaggcttttaatgttttttggtttttgttttttttaatgtacagtcaactgtatattttgtgtttcaggaaactgttaatgacttgggctttggaagcagctgttttaatgaagaagtctgaaacatacgcacctttattctctcttccgtctttccataaattttgcaaaggccttttagccaacagtaagactctgttttttttttttttctattttgtttatcaatccttaaaagggtctttggtaatgggagatggtcatgaatcgagctgttttcctgacctgaagatgtgtaatcctcattttaatgacagatacacagtcttgattttttttcattcttagtattagaaaaatgttttgaagtgattgtcacatttttaagcttacgtgaatgtttatagtttgcatatacttttacattttctctcagaaaaagttttgtgtgatgacccatcagttacattacgtgggttttgttgaatgtatcattttaacaaatgtgacagtcagtgagaattctggacaagagtagtgcctagtctatagtaggcactcactctttgttgaatgaatgaatggattcagataattatgacaaactgggatataatttcttttggccagctgaaagtaactgtcttttaatgtttaatagctctcgttgaagatgtgaatatctgtctgcaggcatgcagcagtctacatgctctgtcctcttccttgccagatgatcttttacagaggtatgaaattaagatcatgtcttttgacattaaccctaataacctggaaatgttaacacacctgctttgtctatttcgttctttcatagatgtgtcgatgtttgccgtgttcaactagtgcacagtggaactcgtattcgacaagcatttggaaaactgttgaaatcaattcctttagatgttgtcctaaggtataacagttgttttggagcaaagacattctgtgatatttatagcctctactggttgtctactttaggagaagacagatcacctattagagcattaatgacacatcttttatggccctgtttgtcagtgattgaagtgatgtcaaataatcgaattttgcaggtctgcaagaaaattaaaaatttttaatgagctttataggctcacaataattagtatagaataactcatgtagtgccaaaatatgtttcttagtagctcagatatttgaaaaactaaacagtaatcttttattgtttttgatcaagttgatttgggagctttaagagcctaaacttgatccttttgtaatacataagcataatgattgggtttttattttcacatgtttgatatgcctccctcaaatcctcttatgatgtcagcacattacccatctgaggtgaataaaaaaaggatctaaagttgtaatcacatctctgtatccatttgaaagtctcaattttactatatttttacctccagtgagttaataagtaaataatccacttacagtatgtgctaaccttttaagctaaaatattttgcataacaactttattttctgtctacagcaataacaatcacacagaaattcaagaaatttctttagcattaagaagtcacatgagtaaagcaccaagtaatacattccacccccaagatttctctgatgttattagttttattttgtatgggaactctcatagaacagggtaaggcatttctttgactcttttatctgggaaacataattttaagattcttttgactttacatgcagttttgaagagaaaatatgtttgggggtggcagagtatcaagtaacattcttctcatatgggttattttagttttcatcaataggaaaattgctttgaagatagcatctgtagaaacaaaaatgggctttgaaattgagtaatgaaatgtggttaacagttaactgatgtgatgtcattaacactttggggaatggggtgggggtggagatattctagacatgcttagttgaattgagtgagtttcattcctgactggcataagccatttaccctaatcatccttccacactgtacctcaacctgttaactataaaagacctcaaaatgagaggggggacacaatgcttctcaatttcataggttttgccttttttggagtagggaaaattacagttccttattcctattccccttgcattttttttttcattattaaaatgaagttgtcattgtcttttaaatatgaaactgcttttcccaggaaggacaattggttggaaagactgttctatagctgccagagactggataagcgtgaccagtcaacaattccacgcaatctcctgaagacagatgctgtcctttggcagtgggccatatgggaagctgcacaattcactgttctttctaagctgagaaccccactgggcagagctcaagacaccttccagacaattgaaggtaactcactcaagctttgtgatgtgaatactttcaaagccttattaagaaatactggattcttaaatctttgttaaagatttgagagtatatgatttttttgaaaaaagtcaataattttcaggtatgtttgttagaataagctttcattgaataattgcattggaaatatgtttttttttccccaaaacttagggagttgtgtggaaaaaatatatatttctttcccctaaaatgaaagatctttcatgttgggattttttatttttaaatgatgggtagacagaggatacttgataaatgtgaattggtcataaaaaactcacacttattctaggaacttttaagatttttaaaaattcagaatgttgtctttgctttcaggtatcattcgaagtctcgcagctcacacattaaaccctgatcaggatgttagtcagtggacaactgcagacaatgatgaaggccatggtaacaaccaacttagacttgttcttcttctgcagtatctggaaaatctggagaaattaatgtataatgcatacgagggatgtgctaatgcattaacttcacctcccaaggttggtttccatgagatagtgttgttttatagcagtttaatggtcacagctggcagtatgtgcagagctgaaatcacagtagacttgtgtatttggtttatatataggtgagacatccttacctacaaattgaaccagtcctgagcttttctttctcttatcgtaaaggtcattagaacttttttctataccaatcgccaaacttgtcaggactggctaacgcggattcgactctccatcatgagggtaggattgttggcaggccagcctgcagtgacagtgagacatggctttgacttgcttacagagatgaaaacaaccagcctatctcaggtaatgtggtgtgtttgaaattcattttaagtctgttaataagaaaagcatggtttaattcctttggtatgatttaatctatggataaaataagttaaagcttggattcattttcaaaggttttgatcctgtattttgtaaaagcaacaactgccagagttacagtgttagaagttaaaataggccgggcgcggtggctcacgcctgtaatcccagcactttgggaggcagaggtgggcggatcatgaggtcaggagatcgagaccatcctggctaacacagtgaaaccccgcctctactaaaaatacaaaaaattagctgggcgtggtggcaggcgcctgtagtcccagctactcgggaggctgaggcaggagaatggcgtgaacccgggaggcggagcttgcagtgaaccgagatcgcaccactgcactccagcctgggcgacagagcaagactccgcctcagaaaaaaaaaaaaaaaaaaaaaagaagttaaaataatgttcatgtttttgtttatgttaaaacaatattcatgttagaacacgttaaaactatatttcttacgtgcaaagtttagaactttaaaggtagttctgaaaatttgtttatgggataaattatttatttatttatttatttatttatttattttttgagacacagtttcactttgtcgcccaggctggagtgcagttgtgcgatctcggctcactgtaacctctgcctctcaggttcaagcctcttcttgcctcagtccctgggattacaggcacccgccaccatactcggctaagttttatatttttagtagagacagggtttcaccatgttggccaggctggtctcgaactcctgaccacaagtgatctgcccacctcggccttccaaagtgctgggattacaggcatgagctactgcacttggccaggagaaattgtttttataacgtatgacaaatgcttgagtaattcctggcttgaaagtgggctcacaataaataactggaatccaaaaataacaaaatgtttagcaattcaggtaatgtcaagcagtattcaaacacatgaagttaatcattccttaattcctgtttatttatatttaatttttgctttctttttactccatgtgttgttcctacagaggtcacaggttgaatgtttgggtaactttggggtgggggtgcaaacatccatgtgctgctaaggttctgttagtcaccctttgtggctattttatatgtaacattttaaagaattctgagctaaataatgtgaaaattgtgaaaataattgttaaatacatttggctttaagcaggcacagactgatcagttgtaaattttatagggatttatgttttaatggtattgggtgactaatttttctgaatgcgttttcaggggaatgaattggaagtaaccattatgatggtggtagaagcattatgtgaacttcattgtcctgaagctatacagggaattgctgtctggtcatcatctattgttggaaaaaatcttctgtggattaactcagtggctcaacaggctgaagggaggtaggttggagggaaggaaatgggtgatagaattactttatgtttaagttcctgtgtattactcactgacattgtagccaaatcttaaaacagctttgtttgctttcagcattgaagcttgctataaatcacttcaccaggaggcgtcttcagtttgttctttagttagcagcaatacttgagtgcctttcttactgaagaattagtggcaaatcacactgtaaaacaagacctgtcagttattttataaatgcttttgaacttgatccctagttgagctccttccccctcagagtctgatacaaattaccctttattgtcagagtatttgctcattagtcctgtgaactctacattcagactcattgcttcctccaggtagaggagcttgtaccataatattctgtgtccatttatgttagtttaatgaaatcttgcgaatttaggaaaataaaagaactgctcatacttccatatctttgtagtaacttctgttgtgtgtccttttgtagttctgtatttccatatccatatgctttgtaattcttttttctttcatgtcgttttctccactcttcaccaaaacagcagcgtacataggcacatggttttatgatctgtttttcccactcaatattaaaaaaaaaatttgccatgttaggctgggttcggtggcttacatctgtattcccagcactttgggaggctgaggcaggtggatcacctgaggtcaggagtttgagactagcctaacatggtgaaaccctgtctctactaaaaatacaaaaaatattagcgaggtgtggtggcacatacgtgtaatcccagctacttgggaggctgagccaggagaattggttgaacctgggaggcggaggttgctgtgagcccaggttgtgccactgccctccagcctgggcaacaagagcgaaactctgtctccaaaaaaaaaaaaaaaattgccatgttaaatattctacagtgttatttttaataaagatttgtatttatgagtgtaccataatttaatatttcttactgttgggcattaaggttgtttctgatatttttttttactaaatgtaccgtagcacttaatatctttgcttatatttctgattactttcttggaatccattctcataaactgatttactagaagaaaggctgccaaaccataagtcttatgatatattctattgctaagctactctacagaaaaggtggctgcagtttatacccttaataatagagtacccccttcccttcatctttgtggatactgagagtcactgagaaacaagaatgctgccaccaccgtcagcaaaaatagttattgtactttacatttctatatttattaatgactaatagtagaagttgccccatatagtgaccttttgtgattttttaaaacatggatcatgtcttcgtggcctctcaatttttcctgtgttaatctgtgaaattttatgaaatactaagattgttgatgctatccaatttcttgatttataatttgtttttaatgtttaatgttgtatttcagcattatgcatctagatctgttacttgtgcatcttttcttggattttatccttctacaaagcctttcccacactgacatcagctacttatcaatattttccactagttcttttatactgtcttacatttttttaaaaacatttaaccacttttaaatttagtttcatagttgtgaggaagacatcaaacctccccccaccatagtcgactcactgttttagctcagtttattcttgcaccattttttgtgggaggggggaaatgagatatgtgtgtttaaaataagactcctttggggctgggcgcggtggttcacgcctgaaatcccagtacttggggagactgaggtgagcggattgcttgagtccaggagtttgagatcaccctggccaacatagcaaaaccttgttttagccaggtgtggtggtgggcgcctatagtcccagctacttgggaggctgaggttggaggattgcatgagcctgggagggcaaggctgtagcgagccatgatcatgccactgctctccagcctgggtgacagtaagactctgtctcaaaaaataagtaagtaaaggccaggcgcggtggctcatgcccataatcccagcattttgggaggccgaggcaggtggatcacctgaggtcaagagttcaagaccagcctggccaacacggtgaaaccccgtctctactaaaaatacaagaaaattagccgggcatggtggcgagcgcctgtattcccagctactcaggaggctgaggtgggaaaatcgcttgtacccaggaggcagaggttgcattgagctgagacagtgccattgcactccagcctgggcaagaagagcaaaacttcatcacaaaaaaaaaaaaaaaaaaaaaagaaagtaagtagataaataaataagactgcttcaatttgcttttcaggtttgaaaaggcctctgtggagtaccaggaacacctgtgtgccatgacaggtgttgattgctgcatctccagctttgacaaatcggtgctcaccttagccaatgctgggcgtaacagtgccagcccgaaacattctctgaatggtgagcgttcagtatttttaaataaagcaaaagttatagtaatatatttcgtactgatgatcttattttatgtttttaggtttctgtgctctttgaaatatttctaactgatctgaatctctctcttcttattttataaaatactttcaggtgaatccagaaaaactgtgctgtccaaaccgactgactcttcccctgaggttataaattatttaggaaataaagcatgtgagtgctacatctcaattgccgattgggctgctgtgcaggaatggcagaacgctatccatgacttgaaaaagagtaccagtagcacttccctcaacctgaaagctgacttcaactatataaagtaaggcttactttttccagttataaaacaaatttccaataactatgatgtttttcctatggcaagaaaatattaaaattggtcatatgtagtaatacaaaatggttatatatctaacttactgccattatgaaaatgacaacaggaaactgacgtcagaggtgagggaaggtatttgtgtaatgggaaaacactgctgagatagtcatttggtattaattttcagaacctgttgttctaaaaccttaatacagtttgaagattatgccagagtgaatataaagaaaaatttgtactgctttagaaagaatcatgtttgatggctttgtttctaaatgaggtctgaatatatcaaaaacatttattctaatgaggacagtttgtgaacatctgtaaattaaactttcttttcattcctctgtgcttttattctgtaattcaaaactgagcactcactctgctgcagacacttggctgggaagataaaggtcattagactttgtctgatacccttgccttctactgctaaatgggttaatgtgtaattgcttcactgagcatgtactatgacccaggcagcacataaaacagacacaaattccaaccttttaaagcaaagattagataaagaatattgatagaaggattaattgaacctcactcaccttttctgtgccataaggaaagcagttaggtaaagctgaccttcttgggagggaagacacaaggtcaaggcatgcccatcaggatgccctttggccctagacctgatgtgagaatggtgggcttggagtattctggaaatagctgggaggcctctgtgtttaggagtgccttaaacagtaggatataagggcagagaagtagctgggaactgagaaaagaactttggctgttattctagtaagactgaaaatttcaggtgggatttgaacagagatgtgttgtgatctgacttggtggttcattctgctatggtgaagagactggaggtggggggcaagtatggaagcatggagaccattaatttatgggggcaatggtagagggaagagaaacaatgctattaactggagtaggagcacacagagaacaagccatgttttaagatttgtaatgaaatgtgcagatgagattgttgggtaagctgttaagaattggatttggaactaaggagaaagtctaagcttgagagatttgcagatcattagtacacagaaaaggccctctttccttttcagtctctatactctagagcctttgtaagcaaccaaaccagagagaagcctctgaagaatagtgagtgaagagaaaggcaggcctgggtcagaatcctagtttagcatttttgtgaaagaatagaagaggaggccattcaaaaaaatacagggacattgagaagggaagtgtcctagatataggacatccagatgggagtagtcagccttgtcagatgctctagggattataaggaaaaagagttttgtagagagacagaagaagctagattgaatactattgagtggtagagacatttgaaaatgaaaagcttgaggtaagttatttggtcagtgagtttttcttgaagtcgaggataggaagctgttgctggagggaaatatgagatgtttattttaaatgttggagagattatgttcttttggccaaggggaaggagccactagaaagcagaggttgaagaaacaggagaaagaacattgatagattaactggcccttaccttttctctgcctcaaggaaagcagtcaaagttggtatagacagaattttggcagtgtatggtggattgggggtaggggtagaggaaattaaagcctactttttttgtttatttgtttgtttttctgaggactgagtcattagctgaaagcatagggcattatagagcatagtggggacttggggaacctgccacctggagaggacttaggaccttttaatggcagaaatgatggatgtgttggcagcagttcatcagtgcccagtactcaagggtccccctgagaagccagtggttgcacggatctaggtagaatcaggcacagaataagtcaggtgatgtgcctttctagcactggcctcaggctgatttataagggaagttacacagcgagagggacaggcaaagatggaaaagagagagagtgagaaacagtgtcttcgtcctggctggagagcccgtgtcatgaaaatggggacagggtaagggatctgaaaggagcagcatagaagctgggaggatgaggcctgtcttcctggcattgatgctgcaggactacaggaaagaatttcagaggtgtcattatttttcatataagcagatgaaagagaagaagtctttgaaaaaagagaagtaggtgaaaaagggagagacggagggatgccagcagtgaaagaagccaggactgagatacaagattgtgatgctgggagagctgcaagggctcatgctgtaggtgaggagtgaggctgcacagggagctcactggcagcttggagagaactgggtgtcaaagttgtcctgcagaggtctactgtcagtgtgttaggatctgaagagaacaggctgcaacacatgaaaacaggaaggagacacaggggcgagtcagctccactgaaagtctgtagctgtgactttctggtttgccactccaatttgagtactaattaagtggtagtcacatcttcaacataaaaaccaaaataatggcatcctcgtggaaggaattttgtcagaaaaatgctgtgtactttgctgtcttcctaggatttgttctgtttttgtttgtttttttttaatggttccacaggctgcataggaatacaagctaaccaatattttaattacagatcattaagcagctttgagtctggaaaatttgttgaatgtaccgagcagttagaattgttaccaggagaaaatatcaatctacttgctggaggatcaaaagaaaaaataggtatttgagaaaatagttttaaagttattttagtggacaagttgctcaaaatgtttggcttagtatattttactggaaaatctggaagttattttacatttttgtgggggcagaatcccatgtgaagcaacaaatttagggctgccctatttatgtttgatttgggaaatgaaaagcacttaaaattaagtcaaataaaaaaaatgaccaccttaatactttgagatttatctagccattttgtttgataaaggacaaagtagtgtttcagctaaatatttttcttgattttcatcttgatgtggctcattaatttatcacaaatagaacactttataaaatgttattaaaaagtttaatgagtattctggattgagcaagatttgctaatgcaggtctagatttgtccccttaaatagtagattgacttaccgattttcttttttgttgagacagagtttcactctgttgcccaggctggagtgcagtggcgcaatctcggctcactgcagcctctgccctctgagttcaagtgattctcctgcctcagcctcctgagtagctgggattacaggtgtctgccaccgtgcccaggtaattttttgtatttttagtagagacggggtttcaccatcttggccaggctggtcttgaactcctgacctcgtgatccacccaccttggcctcccaaagtgctgggattacaggcgtgagccaccacgcctggcctcgacttactgatttttggcctttgaaggcaactgctttttaggggtctgaggtacagtaattttgtatgaagtatgatttttatatagctctcagtaatgcttatagtgtttaactgccttaaatattaaaggagctgttcattggtgattagtttttaataatgccaaacataaatcaaaatttataataaaagcacatgaacttaatgacgttttatttaactttggtagacatgaaaaaactgcttcctaacatgttaagtccggatccgagggaacttcagaaatccattgaagttcaattgttaagaagttctgtttgtttggcaactgctttaaacccgatagaacaagatcagaagtggcagtctataactgagtaagtttactcttacggaggtaaatgtacattgtgtatatcatgtgataaacatacatggggtgaagagggctggaaggagagttactagattactaaatactagtgctaatagcttcattttagttgtagaagtcatatgatatatgaatgctgcttgccaacataaactgaggttgaaatgaaataaaatgtaaaaatccccaaaagcaaatgtcttgacttgctaatatcattttattatagagcaggctgctcctcttactgccccctaactttggatgtcagtttgatagcatcttatcaattgctttattctttgagtggttatgaattgtaatttttattaattggcagtaaatattttgtttcagaaatgtggtaaagtacttgaagcaaacatcccgcatcgctattggacctctgagactttctactttaacagtttcacagtctttgccagttctaagtaccttgcagctgtattgctcatctgctttggagaacacagtttctaacagactttcaacagaggtctgtatatttttacaagcacactcttatgactattaatggtcattactgtagaacaaagaccttattttttgagttttttgaaataggatttgtagctgggcaagctagtagatccagaaatctaacatgctgttttcaggcagtttttcatttgagaagtacatggggcagatggaagaacctgagataatctcaaggatggcaaattgctcagttttttccttctaatttcggggtgggaggtggtgtatgtaaagacagttcctttaggcggattacgtaaattttagatttgctgcaaacaaagatctctcctcttcatcctaaatggggtaaagttcaaccagagatgggggcttctgaatgaatgatgatcttcgagaacttcattataaagcattagttgtaatgtttttctgcagtctgctttatagtaaatgtgctgtgacttttttttttgtaatgtgctttattaagtatactgataaattagacttaatattctgaagaagatttcccttcaaaacaaaaggctttctcttactgtgtgcttgcctcttgtgagtagaagataaatgatgtaagggtatagtgtaatagataaaactactgcaatcaatctgaagtagccaaactatattgcagtcttggacttaagacttgctatatatctgcaaacatatcaacagcctgttttatgttgagtaattttggtttttctctggcaggactgtcttattccactcttcagtgaagctttacgttcatgtaaacagcatgacgtgaggccatggatgcaggcattaaggtatactatgtaccagaatcagttgttggagaaaattaaaggtaagtggtttttttttcttgtaagagaaaattaaaggtgttctttttttaaattttgctttattgaggtttatattacacattctaagtgtatggtttgatgagttctaacatgtcttcacttgtgtgaccaccaatacgatcgagatacagaacaccgtcttaccccagaaggttcccttgggatcatctcctcatttgcccctgtcagcagttactgatttgctttctgtcactatggattagacttgtctttactaaagtttcatgtacgtgaaatcataacaacatgttctcttgtgtttggcttctcttgctcaacatgatatttttaaggttcacccatattgcatgtatcaggaatacaatcctttttattattgagtagagttctattgtatgtatataccccagtttatttctcccttcatcctttgctagattttggggttttttcacattgcgctattcagtataaacctgctctcaacattcatgtgcaagtctttgagtggacgtatatttgtgtttctctcgagtgaatgcaccttgttgggtcacgtagcttaacttaaaaaaattttaatcactgtggtgcatatgtagtgattattagtgattatctcataattttatttacattttcttgattaatgatgctgagtgtatttcatttgtattttagtttgcaaatgtttgttcaaattcttcacccatttttaatgaagacataagacttatttttgtgttctgaacctaagttctttgtcacgtaaaatgcgctatgaatattgagttttaaatactccaaatgaatggctagagaattactatttgtataaatatttatatgtcaaagggatgctaacaatttactttattgctctaaaatagaaaagttgccagaatgctgtgcagttttagtggaaaacatgatagctggtgttactgagtaaatttgagtgttaaatgtcaatgtaagctaacagccaagatagggaccactgcagagtggttacttgaagctgtgactcaactggtccttcactgccaaatatacctggggttggatcattggcctgatgtttgcaaattgaggaaccttagggcaaatcagtgaacttctgaactgctttcctcttcagttatatggggatttccccacttttgagatacttgtaaggattatatgagatgaagagatgagacaaggtatataaaagtcctagcacagagcgtgtcatataatatggcttcacaagtaccctcatctcctttccagtcctgttttttttttttttgagaccatctcactctgttgcccaggctggagtgcctcttcatttttatttctttattcagcaagtattgatcaaatgtgctttgtactaggtactgagctctacgttgtgatataatggtgatcaaggagattgtagattctggcagggaaaactgacatcaaacacggtgacccaacatagcaagaccctgtctctgctagaagaatttaaaaaatcacccgggtgtgggctgggcgcggtggctcacgcctgtagtcccagcactttgagatgctgacggggggtggatcacgaggtcaggagattgagaccatcctggataacacggtgaaaccccatctctactaaaaatacaaaaaaattagctgggcgtgggggcgggtgcctgtagtcccagctacttgggaggctgaggcaggagaatggcatgaaccagggaggcggatcttgcattgagccaagatcacgccactgcactccagcctgggcaacagagtgagactctatttcaaaaaaaaaaaaaaaaaaaaaatcacctgggtgtggtggcatgtgcctatagtcccagctgcttaggaggctgaggtgggcggatagcatgagcctgggaaatgaaggctgcagcgagctatgatcatgccactgcactccagcctgggtgacagagtgacacccggtctcaaaaaataagaaggaacagcaaataacgagggcacctgatttaatcctaggaatcagaaaaagacttgtggggaagtaacatttaagctgagagttaagataaagatgaggaagaaggcaggctgacttggttagaaaaaacgtgtgcaggccagagaaaataatgattcttagttgactcagttcacctaagagagagtaggaagaggtggagcgctggatgagattgagattggaattgaatgctggaaggcatcagtaacaagctgaattcaggagtttgggatttgtcagaatgtcagtgagaagtcatcagaggcttttaagcagggaagtgaaatgttcagatttacccttgtgtaatgtcacttcaattgcaagttggaaaatggattagaagagtataagaatggggtcaaagggacctaagttatgctgaagtctctgctaaagagggtaactagggtggcagtagggaaagaaaaaagcaaatgggccatgagggttgaaagtaaagtctgtgatggtggccaagtactttcacaggcagccggctcatcctgtgcccttccttgagaaggggaaaatggaaaaagggagtaaaagatttggagggtggtggaaaatgagctccatttggcatgactgacattagaggaagcactcttgaaataaatagagtgtagatgaccagttggcaggtgggattcagatatcaggtctgggtgaagattcagcagttgtcagcatttctgtggtaattgaagacacaggaaaagatgatgatgtccagggagagtatgcagtgggaaaagtagagagcctaggactgagtccaaggagcactggtgtttaatggatgagtgatggaagagaaagagactgaggattcttcagcaagataggaagaaaaccaggagaatggtggaagggcagagagtacttacagaagaagtgcggggggatggtttagccttccctgcttccttgctttccctacccgttggcccaggctttttgccaaagattcagaaactaaaaagaaatttcttgaaatgaatgacttgactttacttcattgtatacatttaatttagcaaaacctgttcattgtatctcaagcactgtgctagctgctagggatttgaggatgagttatctttgtttcaggaggtggtgcagaagagggatagttggggaataattttttggccatgtttccatgcagtctggtttagacaaattaggaactaataaaacgttttcctctcttcagaacaaacagtcccaattagaagccatctcatggaattaggtctaacagcagcaaaatttgctagaaaacgagggaatgtgtcccttgcaacaagactgctggcacagtgcagtgaagttcagctgggaaagaccaccactgcacaggatttagtccaacattttaaaaaactatcaacccaaggtcaagtggatgaaaaatgggggcccgaacttgatattgaaaaaaccaaattgctttatacagcaggttagtaaaattaattatggttaatacatgagtataataaaaatcatgtatatgaatgttactgtgtatgtatggtataaggtagtaatagcaaagttgatcatttccagctgttgcagaacatttgcatcctgaataataagttgcttattactgacttacctttataattctgtgctttcaaaagaattttgttgcaatgtattacagtaagaagtatttccggagatcattggtcactgaatttacatgtttttttaactttattattttgggccaggtgcttatgcttacaatctgagcactttgggaggccaagatgggaggattgtttgagcttaggagtttgacaccagcctgggcaacagagtgaaatctcagctatactgaaattcaaagaaattaggggggtgtggtggaacatgcctgtagttccggctgcttgaggggctgaggcaggagaattgcttgagcctgggaagttgaggctacagtgagccctgattgtgctactgcactccagcctaggtgacagagtgaaaccctgcctcaaaaaaaaaaaaaaaaaaaaaaagtttagtattttggctaggcatagtggctcatgcctgcaatctcagcactttgggaggctaagacagtaggattgcttgagcataggagtttgaaaccatcaacatggtggtgtcatcaccatgttgatatttgtttcctaatccaagtgcctccctccatcatttgcttttaaaggttctaagttctgactttgtggttttctgtaggccagtcaacacatgcaatggaaatgttgagttcttgtgccatatctttctgcaagtctgtgaaagctgaatatgcagttgctaaatcaattctgacactggctaaatggatccaggcagaatggaaagagatttcaggacagctgaaacaggtttacagagctcagcaccaacagaacttcacaggtctttctactttgtctaaaaacatactcactctaatagaactgccatctgttaatacgatggaagaagagtatcctcggatcgagagtgaatctacaggtagagttgctttattagctttagaatattaattttagaagctatatttttttctgttttaaagtttataatgttatgctggctataattttccataaaaagtatatctgtggaagttgagtttattttattgttgggaaataactaaaacatatttaggatcgaatgccattttgggagtcactgaactctgcccccaggtatttgcttttatggacttagatgtttttgctggcaataagatcctgcccctcatatcaaaaaatttcacctcacaatagaaggagcaacaaagatttaaaatagttacctgtgttcctattgattggtggaacacagaaactatataaagattcaagtttcccattctggtgctagtgctagtaacacaaagataccttacaaatagggtagttgattctgtccatgtttgagtgcctgttgtggaaggcataattcccctgtttttaaaatttgagagaaaatttgggagatggttttctttgctgaaacatgagaatataccttcattttgttgttctgaagcctaagagtttaattacttacattggtgttaataattttgatagagtcttgatattcataaaggatatgtcttgtggtcattataaatcttcatcttgtcagatgcactatagcaggcagtgtcttcacctttaacaagggaataaagatgtttgcctcatgagtctgtatgaatgaaacagtatactcatcacctatttattatttttgccagaatgattaaagtgaatctgatcatgaggaaatagccagtccgattcataatgcaagacattctacagcacagctgacacctgactgtttacaatgttcagtgtcatgaaagatattgatgtcttccacaggagataatataatcttacttgggaagctaatgaattcatttcaacataccaaccttttagagaacataattcatatttgtgccttctcaagttatgtacagtaatattttggaacttttgattgcttgcagataaaaacctaaaatgctaatggaaatgtcgttaggaatttatgaatgtaacattgttgagttcttttattataattatttttttgtccattttggcagtgcatattggagttggagaacctgacttcattttgggacagttgtatcacctgtcttcagtacaggcacctgaagtagccaaatcttgggcagcgttggccagctgggcttataggtggggcagaaaggtggttgacaatgccaggtatgtttaaatgtgtagtttatttatgcattgcataaatagatatttaaatgtctgctgatatggtaaagtttgggtagctgaaatactgatgacttgtttatttttatagtcagggagaaggtgttcgtctgctgcctagagaaaaatctgaagttcagaatctacttccagacactataactgaggaagagaaagagagaatatatggtattcttggacaggctgtgtgtcggccggcggggattcaggcaaggaaaacatggtgcttggggcaagattgctactccaaatcattgattttgagaaaattgatcatatatatttgataaaatactgaatggggcttaccaattgttgttgtaaataaaaacttctgcattttaagatgaaagtgagttatatttttctaagaagaatatacttttgagaaaataaggcatttccttagagtcctgttaaaaataggtgagttggcctggcacggtggctcacacctgtaatcccagcactttgggaggctgaggtgggtggatcgcttgaggtcaggagttcgagaccagcctggccaacatggcaaaaccccatctctactaaaaatacaaaaattagcagggtgtggtggtgcatgcctgtaatgccagctactcgggaggctgaggcaggtgaaccacttgaatgttgcagtgagatcacactactgcactccagtctgggtgacagagtgagactgtctcaaaagaaaaaaaagttattaagtgaagttcattttaggtaaattacatttattttttaattacttttatcagaaattgtaagttcttaatccttggttgtgagcttttaaaatatgccagtgcacgaaacttactcccagatactctgaatgagacgtgtgcgcgcgtgcgcgcgtgtgtgtgtgtgtatttaaacttactaggtgatgctaatgtgcagccagtgttgaaaatggactagatgatctgtataattcacactctctcccctcagagttccgtcaattctagaatgccaaagcaatatattatttagttgcagtcctcaaaggcatggattttatttgccaagctaagctatatcgatcagttcttgctgtaaacagcagcgtatctaagtctctccctaagctggtgtctgatacatgcacagtactgtgaagagaatgaggtttagtatatgtattctgtgtacattcagcttcaaacttttgagcagattgtgcttattttttttgcaggcataggctgggtgcggtggctcacacctgtaattccagcactttgagaagccgaggcaggcggatcacctgaggtcaggagtttgagacaagcctggccaacatggtgaaaccttgtctctactaaaaacacaaaaaaacagcagggcgtggtagtgggcacctgtaatctcagctacttaggaggctgaggcatgagaattgcttgaacctgggaggcagagaggttgcagtgagccatgattgtgccattgcactccagcctgggtgacagagtgagactttgtcacaaggaaaaaaaaatttctgcaggtagaatactgtattgtaacttggaagcatttaaagtacaacgaaaccccagaaaagtctagtctttgctaaatgcttatattcttcttcactggcttcatattagtaaatatatcataaagagaagcatactgacattgacttactgtgtataacactaaatgtgggataattttatcttttatatatgagaagaattttttatgatagtcaaattacatacctttttcccttttcagtttgtatttaaaatagcattttgtgcacaatttttcttcaggatgaagatataacacttcagataactgagagtgaagacaacgaagaagatgacatggttgatgttatctggcgtcagttgatatcaagctgcccatggctttcagaacttgatgaaagtgcaactgaaggagttattaaagtgtggaggaaagttgtagatagaatattcagcctgtacaaactctcttgcagtgcatactttactttccttaaactcaacgctggtcaagtatgtagcacagtgttctaagaaaatttattttggaaactttttcttattaaacaaaagtagtgttctgagttattttcttatttattcccctcatctttcactcttagattcctttagatgaggatgaccctaggctgcatttaagtcacagagtggaacagagcactgatgacatgattgtgatggccacattgcgcctgctgcggttgctcgtgaagcacgctggtgagcttcggcagtatctggagcacggcttggagacaacacccactgcaccatggagaggtgagacctgcataaaatgtttcaggaaaaatagtttctcactaggatatataagatttcaaaaagtggtttccttatgtttattatttgaatgtgtaaaaagaatagccagattaacttcctaggacaccctgcactgcttgttacatcactaggacttttcctcccacctttccaagaaatgggaagctgaaaggcaggagctttttatatacaaaatgagttttggagagggtggtgaaaaattttcaaaaggttttatataccctctgtaaaaattgtctgtgcctgccttgtttgtaggcattcacagaagatacatttctccgtaacatttttgagctgccctggactttgattacagctctgtatctaaaccaaccttaaccagacttgcgaatcaagaactattgtgtatggttctttattatcacagggagaaatttgaactcttaaaatccgtactaatgccgacacacatcacgttttatctgtttgatctacgatgctgatagtttcttcatagttttaaataactttaaagtgtctttctctcttcttgtcctgaaggaattattccgcaacttttctcacgcttaaaccaccctgaagtgtatgtgcgccaaagtatttgtaaccttctctgccgtgtggctcaagattccccacatctcatattgtatcctgcaatagtgggtaccatatcgcttagtagtgaatcccaggcttcaggtatggaatattcaaatattgctactttgagtataaatgactgtgccaataattttagtgaggtcaaagtttttaagctttatgttccagagttgttagagtttgtagggttttttttttttttttttttttttttttgagatggagtctcactctgtcacccaggctggagtgcagtggcaccatctcagctcactgcagtctctgcctcccaggtttaagcagttctctgcctcagcttcccgagtagctgggattacatgtgcgtgccaccacgcccagctaatttttgtactttcagtagagtcggggtttcaccatcttggccaggctggtcttgaactcctgacctcgtgatccacttgcctcggcctcccaaagtgataggattacaggtatgagccaccgtgcccggctgtaggttttttaatagtaataattagcatttattgagggagtaactactatgtatctggcaccaggacatgtgctttacacattatctgtagccttgacagtaatccaccaagacgtggagaaatggagtacctctgccaggctcactgagctgttactgatggataagaattataccaatttttggccaggagcagtgactcgcacctgtaataccagcactttgggaggccgaggagggtggatcatttgaggccaggagtttgagaccagcctggacaacatggtgaaaccctgtttctgttaaattagctgggtatggtagcacacacctgtagtcccagctattcaggaggctgaggcacaagaatcacttgaacccaggagacaggttgcagtgagccgagattgtgccactgtactccaacctgggcaacagagctagaccctgtttccaaaaaaaaaaaaaaaaggattataccaagttttgaactctggcttgaagaatacattatttgttaaacactcattatctttctcctttgtatcttccattagcttataatattaataaatatgaaagctcaacctataaaaaggcagaatatccacaatctttaatcagttctatgcctggaaggcaaatgagttcaatgagtgctcttgagtcaaatagattatcagtgttttccctaacctagcatatgcacatgggagaaatgttcaaaatattccttgttctcctatttcattacaggaaataaattttccactgcaattccaactttacttggcaatattcaaggagaagaattgctggtttctgaatgtgagggaggaagtcctcctgcatctcaggatagcaataaggatgaacctaaaagtggattaaatgaagaccaagccatgatgcaggattgttacagcaaaattgtagataagctgtcctctgcaaaccccaccatggtattacaggtacaaagaaactcacatgttgtagaagaattttttatagaataataaaaattgcttttgccaatctgtattgacaatcactggtcagggttctccaattgtataatgagcaccaattgcacacacttaacttacaaagtccagtgtttgaagagctgtgctgtgcataggcttgtagatgagctatttgggtgtgctgtgtatgcaggttcagatgctcgtggctgaactgcgcagggtcactgtgctctgggatgagctctggctgggagttttgctgcaacaacacatgtatgtcctgagacgaattcagcagcttgaagatgaggtgaagagagtccagaacaacaacaccttacgcaagtatgtttccatacacttgtcctgagacagtgaagctgccactttgtttcaaagtataaataacataaaatttactattttaatttttaagtgtacaattcagtggcattaaatacattcaccatattgtacaaccatcaccacggtccatttccagaacttattcattatattaagcagaagaagctctgtactcattaaaaattatctcttcatttccccctcacctcagttcctggccacctctattctacttgccatctctattatgaatttgcctattttagctacctcatagaagtagaaacataaactatccatctttttgtgtttggctttttatacttagaataatggcccgaaggtttattatgttgtaacatgtgatataatttcatttttttatcgctgaataatactgtatgattataccgttttgtccatccgtttatggacagctgggttgcttctacattttagctctgtgaacagtgctgctgtgaacattggtgtatgagtatctgtttgactctctgctttctattattttttgtgaatttcatgtatattttgtggatgatccagtggatttgctgaatcgtatggcaatatggcaattctacgtctgacttactgaggagccaacaaacttttccacagtggctgcaccattttacaatcctcctagccatgcatgagggttccagtttctcctaatccttggcaacacttcttttcttttctttttttgataatagctgttgtgatggatgcgaagtggtatctcactgtggttttgatttgcattttcctaatgactagtgatgttgagcttcctttcatgtgtttattggccatttgcctatctttggagaaatgtcattacaagtcctttgcccattttttaattgggttttttgtttttttattgttgaattgtaggagttctctatgtattctgggtactaacccttatcagatacatgatttgcaaatatttgctgccattctgtgggttgtcttttcattctcttcatagtgtatagtattttttgatttacaaaagttttaattttgatgtagctcaatttaatttgtctgtgcttttggtgccatatccaaggaatcattgccaagtctggggtcatgaaacctttcccttatgttttcttctaagagttttgtagttctagcttttaagtttaggtctttgatccattttgagttattgcttcattcttttgcatgttgatatcacattttccttgtatcatttagttcattgaaaagaggagctgcctcttttatgagctgcatttttttaaaaaacaaaaaattcttggctgggcacggtgactcatacctgtaattctggcactttgggaggctgaggcgggcggatcacgaggtcaggagatcgagaccatcctggccaacatggtgaaaccccatctctactaaaatacaaaaaattagctgggcgtggtgtcgcgcgtgtgtagtcgcagctactcaggaggctgaggcagaggaattgcttgaacccgggaggtggaggttgcagtgagccaagattgtaccactccactccagtctggtgacagagcaaaactctgtctccaaaaaaaaacaaaaccaaaaattctttgttagtaatttactttgtgaatatgttattgctttatttagacttattccttggtactgtttacttaacaattgatatattgaaattgttgcatgtttgtgtaaaactttaatgtacacatttaagtttttgaataaaaatgtcttcttggtcagagaagagaaaattgcaatcatgagggagaagcacacagctttgatgaagcccatcgtatttgctttggagcatgtgaggagtatcacagcggctcctgcagaaacacctcatgaaaaatggtttcaggataactatggtgatgccattgaaaatgccctagaaaaactgaagactccattgaaccctgcaaagcctgggagcagctggattccatttaaagaggtacagaataatcccaagcatgctactgaaatggcacatcacagttcccatgagatacgaaatttcaataagtggacttcttacttggaatgtaagagattttataagcctataggaggcagcctgtggccagttgcttataaggaacatagaaaaaagtgtttctgtttaagaatttggaaatcagtgggcaaagggggatggacggcaaaggtgcccaatctttcatgtatggaaggctcacaccagtgaacaacagatgaagaaattagccaaggaaggggctgtgaccctgagctaaatattggttgcctgctttatttacctcattaaagataagaaatttaactttgtgcctatgtagtttttcacaaggagagcattcagtatttctaacagataaaatagtcgcttataacaacataaagttttacaagtagttctggaatcaattccacatatgctgcgtgggatgattagtgtattcacatatttgagaatccttatcttttatattttggttttcttaattctatattctcttaggtctttatcttttctagcaaataacaccattagttgggggagcttattactttgtagctccagcttttccttctccctccctcttttctctgtctcttacctttattgctcctaactgatttccttactgaatttgagcagtgagaaagctattaaaagatacatgtagaaacaaaaagtacagccaactttagcaaatgcaaggtgctaaattcagagcaaatagctagaagtacaagaaagaaaactaacatgaaggatgaagtttattatgtgttcttgccaaaactcgagtttccgtgtgtgtgtgtgagagaaggatgaagtttattatgtgttcttgccaaaactcgagtttccgtgtgtgtgtgtgtgtgtgtgtgtgtgtgtgtgtgtgtgtgtaggtgggcggggggggggggtgttgtttgtttgttttgtttgtttttttttgagatggagtctctgttgcccaggctggagtgagtggcacgatcttggctcactgctgcctctgcctcccgggtttaagtgattctcctgcctcagcctcccgtgtagctgggattacaggcacacaccaccatgcttggctaatttttgtacttttagtagagacggagtttcaccatgttggccaggctggtctcgaactcctggcctcaagtgatccaccctcctcggcctcccaaagtgctgggattacaggtgtgagccactgctcccggcctgcgtttccttgtgttctaagaccagtttcttgtttctttgtttccctttcagtaaatcaaattagaaaatcagaagaggatataggaggaaaccctgtaaaccctgtttgtgtgcgcacgtgtgtgtgtgtgtgtgtataatcatagaaaatttttaaaatgattttgtacatttaaagaataattttaaaaattaagaatacctgtgtctctcttttagatatagtacagctcaaaaaaaaggaattacctaaagaaattaaactttatagaagtcctacttctctccctaattttatctccccacccacaaccagttttctgagttttaattaatcactatctactttaaaaaatagtttttgtttacagatgcatttctaaatgacactgtttagtttccgcctgtttttgaacttctacgaatgagatcatattgtgtgtacgtctacttctttttactgccatattggattggtattaagttttaaaataattgatcaatttttgtgtgtgtgtttgtgtagctaaacaatgatctattatatgaaaataccacaatttattcttttgtcattgggcacttggggtgtttccaattggtttttttctttttatgaacagagcttgctaaaaattgctttacattttttcacatggaagcggagtccagaatttgttaatttgggtgcatattattgagtttgctgcatgtagcaacacaactgtacatacagtctgttccctgtgattattagaaagtattatagggcttttctgcaaacctcaagtggtcagacctaaatggttacttctctgttaaaaatgttcttacttgtctttgtcttttcttcagttttgttaagtctcttagagatccaccaaatttcctctactccagtttgataagagtagattgagcctcattttttcttgtaatttaaggttaataactttgcaggtggctttttaaagttttgtcgacctgacagccgactgctagctgtacctattgcaaggactggattgttttggtgttgtgcatacatagctcaacattggggaattattaatagtttgctaaaagcccctaattgggtgatgatcacagcagtgttttccttctatctcctgtgatttcactgcatgtttggacagaggaaaagaaagagtcttaacaaagaatcctgtaatgcacatcggccaccagcgttaacccatccaggatggcccagatcccagtactgagttaaatgtagaaataagaacagcagatagttgtgtggattttaaaatttagttttgttgttgtttttgagacagggtctccctctctcacacaggctggcatgtagtggcgtaatctcggctctctgcaacctctgccccctgggctcaggtgatcctcttctcctgccctagcttcccaagtatctgggactacaggcacgagccactgtgcctgactaacttttgtattctttgtagagatggggttttgccatgttgctcaggctggtcttgaacttctgaactcaagtgatctgcctacctcggcctcccaaagtgctgggattacaggcatgagctgccgccgtgacctaaaatttacttttatgccatattgaatgtggaagaaaataagtgttctaatgtaatgtaaatttgtttctcccatcttatgaatatagataatgctaagtttgcaacagagagcacagaaacgtgcaagttacatcttgcgtcttgaagaaatcagtccatggttggctgccatgactaacactgaaattgctcttcctggggaagtctcagccagagacactgtcacaatccatagtgtgggcggaaccatcacaatcttaccgactaaaaccaagccaaagaaacttctctttcttggatcagatgggaagagctatccttatcttttcaaaggtaggatttaagacttcctccatttttcagaagagtattagtcttactaatgctttgtgtgagtgtgggtgtgtatagtaggagattatttcaggcgaatttctgtatgtcattattagcctgcagtgccctatatcttatgtgcttttgaacggcagtgattggatgccgtgcagaaagattttccacccccactttgtgtatgaacttgtacaagcaggacaagtgaggtacagctaataatgctaatatctactgccaatatcttgtcccaaaatagaattctttaatgctctcagtgtgcctcatggactgtcagtttttgactgccactgctagttgaaaaagaggagtggtatgctcccaaccctgtttaatcacctatcctagctattttaattttgttttcataggactggaggatttacatctggatgagagaataatgcagttcctatctattgtgaataccatgtttgctacaattaatcgccaagaaacaccccggttccatgctcgacactattctgtaacaccactaggaacaagatcaggactaatccagtgggtagatggagccacacccttatttggtctttacaaacgatggcaacaacgggaagctgccttacaagcacaaaaggttgattaaatcatctacacagtgtattagtctattctctgttattatgtgaaatacttgtagacttactggaccatttttgcatgtttataagcagttaaagaaggaaaagacttgaggtccctaggagagtatttttgaggtactttttttttttttttttttgagacacagtcttgctctgtcgcccatgctggagtgcagtggtgtggttttgggtcactgcaacttctgcctcccaggttcaagcaattctgctacaggctcccgagtagcgggaactatggggggcgcacaaccacacctgggtaatttttgtatttttagtagagatgggattttgccatgttgctcaggttggtctcgaactcctggcctcaggtgatccacccgcctcagcctcccaaaatgctgggattacaggcatgagccaccgcatctggccttgaggtaccttttataaaaataaagttgtttgcttttttttggttttgttttttaaagggacagggtcttgctctgttgtccaggctagagtgcagtggtatgatcatagctcattgcagccttgaactcctgggctcaagtattcctcccacctcagccttcttaagtgttgggattacaggcatgagccaccacacccagccaaaaatagttatataagaggcaaaagtgatggcattgggtttatcttaacttgagacaaatttggagagggggaatgtgtggttgttcatcactcagtaacttgataatttacatcttagtgtttttattggatttaccatgcttttaaattaaatttgtaaataatcgctttaaaacccaggttcttttatgtatgtaaataagaagcaactttaaatttggaattaatcaccatggcatcctattttgtatctatgaattttatgctttgatttagactaggagtttaatttagaatatattttagccatgtatctgagtgcttaatatatgccaggaacagtactaagctcttaggatattgagataaattttatacagtcttatcttcaggatcccacatctagctaaagaaaatgcttttgataagggtaggtaggggaaaagagcatgagtttgaaaggaggcaagttttaaacctaggcacaggagactgcagaactgttattgaagggtaatttcaaatagtaattagagaagggctatctaaattctcatgtaatgtgtttttgaatttctgttgttaattttatattaacgattaagttgtgtgtgaagaatgaagtatgtgcataaattatgaactataattttaaaactgaattctgtattataaagaagaaagtaacttgagtgtttagttttgaattgaacctcaagaaaattaaacagtagaccaatttttcaataaagtgaatgggcctaattaaaaggtatatatcataagaaagatccatagtccagaataattagctattttgtattaatacatgaaatttagttgagtaatgagagaatgctactgaaaaatcatttttaaaaattctactttacatacaaaaggcactctttttccttatataaaattgatcttttcttttttaaaaaaattgttttttcttaaggcccaagattcctaccaaactcctcagaatcctggaattgtaccccgtcctagtgaactttattacagtaaaattggccctgctttgaaaacagttgggcttagcctggatgtgtcccgtcgggattggcctcttcatgtaatgaaggcagtattggaagagttaatggaggccacacccccgaatctccttgccaaagagctctggtcatcttgcacaacacctgatgaatggtggagagttacgcaggtatgtgctttgttttagactatactcagtagtagtatttcttttgcctgctaccttcttgcctatcttgtttgtcctccttcccttccttcctctgtccctccagacttggtagtttgagacgtatatttgagtttaatattacagttataaaggcatgaacatgactgtgtccgagggcaggatggggaaagagttatggaggaaatgaaaaggagatcctaagcaaattaacacaggaacagaaaactgaataccgcatgttctcacttataagtgggagctaaacattgagcacacatggacacaaagaagggaacaacagacactggggcctacttgagggtggggggcaggaggagggtgaggtaggaaaaaatacctgttggatactatgttcattacctgggtgacagaataatgtgtacatcaaaccccagtgacatacaatttactcacgtaaagacctacacatgtccctctaaacctaaaagttagaaggaaaaaaatttttttaaataaaatcaatatttaaatttaaaaaaagaaagaggtcaggcacagtggctcacatctgtaatcccagcacttttggaagctgtggtgggtggatcatctgaggtcgggagtttgagaccagcctgcccaacattggtttgggcaacactgaaccccgtttcaaccaaaaatacaaacaaaacaaaacaaaaaaaagaataaaaaatttagaaagggacaaactaggaagactgaagaaaagtttgtttgtttgtgttttttttaatccagcatcctgatagctgattaactaggaccaatcaggtctacagtgttgtatgcctgcataaccacatgcagcaaccttgaggaatgctttttatttgttgatttattttaaaataagggagtaggttaatggtgctttgtaaattttatagtatcacgtccatgttggagggaaatttcttaatggtgtttcacttgctgcccccatttcctttcctttagtcttatgcaagatctactgcagtcatgtctatggttggatacataattggccttggagacagacatctggataatgttcttatagatatgacgactggagaagttgttcacatagattacaatgtttgctttgaaaaaggtaatataaaagtagactttacatttatgagggccaaatgttttttggtgaaagggcaaaaatataatgatttgtcttttcaaggtaaaagccttagagttcctgagaaagtaccttttcgaatgacacaaaacattgaaacagcactgggtgtaactggagtagaaggtgtatttaggctttcatgtgagcaggtatgctgttttctcttctcccttttagtgtatttgttaaatgagcaaaacctgtggaatgaaaaccacactttagtgatgaaacttgtggcagaccttattttaaaaactctcctgaaaacaggttttacacattatgcggcgtggcagagagaccctgctgacgctgctggaggcctttgtgtacgaccctctggtggactggacagcaggaggcgaggctgggtttgctggtgctgtctatggtggaggtggccagcaggccgagagcaagcagagcaagagagagatggagcgagagatcacccgcagcctgttttcttctagagtagctgagattaaggtgaagcccagtgacggaataagtcattgtcttctttttattaatagagtaaacatgctcatcaaaatgttgaggcaaattgtttctctaatttttttggcaaaactaatgtataatattgaaatggcagttaaatatggcagtttgatgttaactttttattaggtaattcttccacacaaacatgcacagttacattccacactcctaagaggtgggttcatgatttgaaaaaattatatttcttaattattgaaatgtgtttaccagtgatgactgtaaatgttctttaattggatagcttcccttccctatctggtagccagggatgccagtcttgttctgggtgacattggcaactattaatacatggtattatgagattgagcctgtcagtttatgcctgtgtaaacttgaacgcattagttgtttttgtacagtggaggcaacgcatcacccctttcgggttttgtagagatttaagtaggatgtgcaaaatgttcttctgacactgttgtgtctcaaaattggccctgtaagagtcttcttaatcgtaatatctttttacaggtgaactggtttaagaatagagatgagatgctggttgtgcttcccaagttggacggtagcttagatgaatacctaagcttgcaagagcaactgacagatgtggaaaaactgcagggcaaactactggaggaaatagagtttctagaaggagctgaaggggtggatcatccttctcatactctgcaacacaggtttaaaacagtgttgaattcttctaaatatgtgccattaattagaattttcatattcatgtaaacatcaatatggattagaattattgtaacaaatcacataaatgataaaagctgtctcagtgactgcaacttcaaagtgttagtaaacaaaaattcactgaaattgtctgcttttattatatttaacttaaatgtttgaatgactaattatgggagataggtgggtgtagtggttagaacacaaaacttggaatcagaaaatctgggttttggttttctcattaccattatgtatcttgagtccttactcatttgtacaatggcagctacttcatctacctcactaagtattaaataagatgattaactgaaagaaccttatacacagcaggtgctcagtaaaagggtagttgaatatgaaagtgtcaagcattgtgtgaggctctcagattacaaagatctgtcaagcatcagtctctaaccttcaaggaacctaaaacttggcagatgtggcagttttaattaaaatgtcatgagcatggttgagggaatcacagggtcaggaaaaacagagaagtaagggacatttgaggagggccctcaaggtgaacaaggagcgtaccagacagtccatgtgtgagcacattccagggtaggaaagtatgtggaagaaaacagcaataaatcttttgattttgtttgtgtccccctgattaggtattctgagcacacccaactacagactcagcaaagagctgttcaggaagcaatccaggtgaagctgaatgaatttgaacaatggataacacattatcaggctgcattcaataatttagaagcaacacagcttgcaagcttgcttcaagagataagcacacaaatggaccttggtatgggttgacttattttagattcacatgtgaaactatgagttttatagtcatgtgtgtttgtgtggggtcctggtttgtgcttgcttttagtgacagctgacttgaccctgttttactgtgtttaataatgtcttttaccaaaaggtcctccaagttacgtgccagcaacagcctttctgcagaatgctggtcaggcccacttgattagccagtgcgagcagctggagggggaggttggtgctctcctgcagcagaggcgctccgtgctccgtggctgtctggagcaactgcatcactatgcaaccgtggccctgcagtatccgaaggccatatttcagaaacatcgaattgaacagtggaagacctggatggaagagctcatctgtaacaccacagtagagcgttgtcaagagctctataggaagtaagttgatagtgcttaattttcttttatttttgagacggagtcttgttctgtcacccaggctggagtgtggtggcatgatcttggctcactgcaacctccgtctctgaggttcaagcaattcctctgcctcagcctccagagtagctgggactacaacaccaccaagcccggctaatttttgtctttttagtacagacggggtttcactatattggccaggctggtcttgaactcctgaccacgtgatctgcctgcctgggcctcccaaatttctgggattacaggcgtgagccactgcgcctggccaattgtatttcttattgggagtggaagcaaagttgtattctgcagccttgacctccctgggctcaggtgatcctcccacttcagcctcccaagtagctgggaccacgggcgtgtgtcaccacgcctgaacaatttttatatttttttgtagagatggagtttcgccgtgttgcccaggctggtctcgaactcctgagctcaagcgatcctcctgccttggcctcccaaagtgctaggattacaggtatgagccgtggtgcctggcctcaaatgttgattctgtcacagtcatcaacaagtccttttaggaaattgcttaagctcttgagacatttttatctgtaaaatgtaaataatgatttctactcttcaagttttgtttgaggattaaatgcaatattcttttgtatgttgggggtggttgtgttataaacaagcacctcttccttatttttatagatatgaaatgcaatatgctccccagccacccccaacagtgtgtcagttcatcactgccactgaaatgaccctgcagcgatacgcagcagacatcaacagcagacttattagacaagtggaacgcttgaaacaggaagctgtcactgtgccagtttgtgaagatcagttgaaagaaattgaacgttgcattaaagttttccttcatgagaatggagaagaaggatctttgagtctagcaagtgttattatttctgccctttgtacccttacaaggtaagttagccaacttcatattggaccatttcctgtgtcttatttttaatcccaaacctaaaatgttcttttactttccttagtcttgccaagtgttacagctgcttacttgcttttcagattttagttatcttggttgtgttttgagacagggtctcactcttgacactgaggctggagtgcagtggcacgatctcggctcacagcaacctcagcctccttaatagctgggactacaggtgtgtgccaccacacctggctaatttttgtattttttggtagagatggggttttgccatattgatcaggctggtctcgaactcctggcctgaagtcatctacctgcctcggcctcccaaaatgctggaattacaggcatggccttgacccggccagttaccttgttttgtttatacatttaagtttcactgtacagatatttatctcttgtaggcgtaacctgatgatggaaggtgcagcgtcaagtgctggagaacagctggttgatctgacttctcgggatggagcctggttcttggaggaactctgcagtatgagcggaaacgtcacctgcttggttcagttactgaagcagtgccacctggtgccacaggacttagatatcccgaaccccatggaagcgtctgagacagttcacttagccaatggagtgtatacctcacttcaggtgaacacttttattttaaatattagtttgttttagatactgaatattgtctttctcatctctttaacccaggaaagcaatttgacttccccatttgaatgttgctcaaccagtcatttaaaaggaagataattgtgagatttatagctataacttggttacagttgctctttgtttttttgaatttttatagcagctttatttgtaatagtcaaaaactggaatcaagtcaagtgttcatcaagcaaatggacaaatatggtacatccacataatggaatacttcttagcaataaaagtgaacgacaccttgataacatacagccacatgtatgacttacaataattatgctgagtaaagaaagctagacatttctacccctataaatggagagtgtataatatgagaaaaagcagatcagtgtttacttggagatggaggaggtggtatggagaagtgtgagtgagagagattaagaagtcaggaggaaatttgtagggtagtcggtatgctgattttcttgattgtggtgacagtttcatgagtgtatgcaagtaccaaagtataacaaattatatattttaaacatgcagtttattatatgcaaattataccttgataagactttttttttttgaagggaaatagaagccacttataaccaaaccaaaaagagaataacaatgctaatatcactacagaaatatgattcctaaaaattaataacattatataacatactttagggcagttctttttgttcttaaggtacatcatcctaggaatgtttaattatatgacaactttttaaagtcatttgaaatagttcctgaaaaatttcacatgactatgaaatagaatttgaaaagaaaatatttaaaagtagaaataaaaagtaaacaaaagatgtacttacatgaatgagttgatggcatagttacataagtttgctcttaatgtatggctctaagtctccaaatgtgtaacttagctaaactcaaaaaacattaaaagtttttttctcatatatttataggaattgaattcgaatttccggcaaatcatatttccagaagcacttcgatgtttaatgaaaggggaatacacgttagaaagtatgctgcatgaactggacggtcttattgagcagaccaccgatggcgttcccctgcagactctagtggaatctcttcaggcctacttaagaaacgcagctatgggactggaagaagaaacacatgctcattacatcgatgttgccaggcaagtgaatgctggctgtgccgtttccttgtaaaagagatgggacagccagagaaagggattctgagctctttaacgtaagtttacttttagtttttagagcaggtataattacttataaatgctcatacacgtatctttttaaaacttttttattttgaaataattatacatcacgagaagttgcttaaaaaaaaagtgcaggcaggtattgtgcatgcttcatccttccttcagtgttagtatctatagtaacactatgaaaccgacaatgatatagtccacaccgcttactcagatttcactagttatacatgcacttatttgtgtgtgtgtgtgtgtgtgtgtgtgtgcgcaagtgtatagttcggtcacatacatacatatatccttttagtgcttgtagttatgtacatgtacatacacacagtcgaacatgatatttttaagccatcttgtagaaccccttggagacacctgaaacagtttatttagctaacagagtacacacctcatttcaggtgaatacttttaaattagtttaaatattgtaagtttgttttagctaattggatattgtatttttcatctcattagtccagaaaagcaatctgactttggaatctgtagagtttgggcagttcctgcagacatgcattgtactcagagctaatccctaagcttctttgtgcctagtgactcagggcctcttttctttggcgttccaatgtctaattcacagaagaagtataattgagagagtagaaatgaattgtagcaccgtttcctcccatgggaaatttcaaagatacaagactgtagagagaatagtctaatgaaccccctgccaccacctttggtaattatctgcactgggctagtctggtttaaatttactaccctagttatttagaagcaaatattttttcattcttaaatattaataatgcagaaagtatacatatatatgtaatcttatttttcttgactgtggtgccattatttcatgaaaaaagtagcaataattccttaatgttaattatcctgcattcagaaatttcctgtttctcatgtttctttggagtggttatattcataaaataataaatatattcatatatattcataaatatgtacgtgtgtgtgtatatatatatatatatgtattttttttttttttttgagatggagtcttgctgtgtcgctaggctggagtgcaatggtgcgatctcggctcgctgcagcctccatctcccgggttcaagagattctcctggctcagcctccctagtagctgggactatggacgtatgcccccatgcccggctagaaaaagtataatcattaatagcataaatattagattatttatagaacagctttatcatataatttttagcagtatttaaaaagttaaatgctagatctgtacatctttgttttgcactgaatttcagacttcattttatctctcttaatatcttatctgggttccccttatcctcatacagaggaatgtttacctaaatgtgtactttgggtaacaaactttgtgcctggatctatggcagcctgtctgtgccttgtttcagagaagctttttttgggtaatctcaaggaaaatctcataccatcttacagctctttttccattagaaatttatctggtagtttaacatttttaattctcttaaaaattcttaatagttccagccatttggaatggtttctgtgtgtgtgtgtgataagaaatagtgcctggatacataagcactatgtaagtcttaatggtaatgtgaggggtgaatttctgaagaccttacattcaaaatgtgcataaataaaaaccaagcatacccaaaatagcaagtatacttggttgtatcgtatcttgtagtaatagtgcgaacatacctgacaatttactaggtccgccagctttagaatggtgtgatttctgacatttttcaatacaggattttaaattatttcatattttgtgtgtaaaaatgagactgatcactgaagtttgcataaaatttaatcacataacagtcattaataacgaattggaatcattgaaatcctattgtggttgacatgaaataccattttatcatcataacattccttctttttttttgagatggagtttcgctcttgttgcccagactggagtgtaatggcgcgatcttggcctcctaggcaacctccgcctcctaggttcaagcgattctcctagcctcagcctcctgagtagctgggactacaggtgcccaccatcacactcggctgatttttttgtatttttagtagagacggggtttctccatgttggtcaggctggtcttgaactcctgacctcaggtgatctgcccacctcggcctgccaaagtgctggattacaggcgtgagccaccgcgcccggcctaataacacttcttcttaatgccagaaggctttctagactctcacagcatgcagctgtgagatgtactgactttgtatgttcccaccaaaggcattacttttcagcgaaggttttaactccttttgtttttctgtagactactacatgctcagtacggtgaattaatccaaccgagaaatggttcagttgatgaaacacccaaaatgtcagctggccagatgcttttggtagcattcgatggcatgtttgctcaagttgaaactgctttcagcttattagttgaaaaggtaaatgtggacttggatttaaaaataatgcaagtgccataaagtagttgttcagttgtgtcaagagtggagaaatgaactttgttttctttcatttacatagttgaacaagatggaaattcccatagcttggcgaaagattgacatcataagggaagccaggagtactcaagttaatttttttgatgatgataatcaccggcaggtgctagaagagattttctttctaaaaagactacagactattaaggagttcttcaggctctgtggtaccttttctaaaacattgtcaggtaatattctacctgtaaacatactagctttagctatgtagcactatggaagggggcaggatagagtaggcttaatttaattatacattcatgacaccttaaatactataaataagcagcatattacctgatttttttcatgaaatacaagaaatttttcctttttgtaggatcaagttcacttgaagatcagaatactgtgaatgggcctgtacagattgtcaatgtgaaaaccctttttagaaactcttgtttcagtgaagaccaaatggccaaacctatcaaggcattcacagctgactttgtgaggcagctcttgatagggctacccaaccaagccctcggactcacactgtgcagttttatcagtgctctgggtgtagacatcattgctcaagtagaggcaaaggactttggtgccgaaagcaaagtttctgttgatgatctctgtaagaaagcggtggaacataacatccagatagggaagttctctcagctggttatgaacagggcaactgtgttagcaagttcttacgacactgcctggaagaagcatgacttggtgcgaaggctagaaaccagtatttcttcttgtaagacaagcctgcagcgggttcagctgcatattgccatgtttcaggtaagtgtttttgtttataatgtgtttttcctcaaggtaggaaacttgaaaaatgggggaaattaatttaaaacaatacacagaaatttttttaaaacttcctgaactcacagcaacccaatgcaaacacaccatagcattttggcactttctttccaatgatacttcgtttctcttctgtatagttgagatcatttatcctttatggtttgtgtccttagaatttctttccatcaaggctgtatgataagcatgatctgtattaaatattgcttttttttttttttgagatggagttttgctcttcttgcccagactggagtgcaatggcgcgatctcggctcaccgcaacctccgcctcctgggttcaagcgattctccctcctcagcctccctagtagctgggattacaggcatgtgccaccacgcctggctaattttgtatttttagtagagatggggtttctccatgttggtcaggctggtctcgaactcccgagcctaggtgatccacccgccttggcctcccaaagtgctgggattataggcgtgagccaccatgcctggcataaatatagtttttaatgttgaattcattcatatgtaggtatgcttcctgtatttatttctaaagtagtttctctttccttgatgccttattgatgtgataaacagctttgggaataaatctgtctttattttggaaatggtttttagaagcctagttttggccttaattacttaggggatgtataacagcacaggctttggggtgagatggatttgtattcaaatgagacttgggtatataaacttgtacttaacttccttaagctctgatttccttaactgtagttaacatcttcagaattactatttaaatggtgcatgtgagtgatccaagaaatttattagccatgttctacctcaagaagactttcacctggatgtgatttttttcagtgtgtcttttctgttacttctccctgcttacctcccattggctgcagctgggatttttttctcttccgccagtcctaggttgcgcctcccttcccttatttatctaaacgcttttttcctgctgattttaatacatttctttttctctcaacagtggcaacatgaagatctacttatcaatagaccacaagccatgtcagtcacacctcccccacggtctgctatcctaaccagcatgaaaaagaagctgcataccctgagccagattgaaacttctattgcaacagttcaggtgtgttttgccagatcttccttccagggcattttctttttagaaataaccaatactatgattgttagtgctctgttgttcagtgtgtctatttgtgtgtccttggcttgtaagccagaagagcataatttttttcacttttgcttttaatttatacatatatatatatatataggtatatatataccaaagatatataaaaacatatactttggtatatttataccaaataccaaaatatatataaaatatatatttagatatatttataccaaagatatataaaaatatatattttggtatatttataccaaatatatatataaaatatatatttagatatatttataccaaatatatataaaaatatatattttggtatatttataccaaatatatataaaaatatatattttggtatatttataccaaatatatataaaaatatatattttggtatatttataccaaagatatataaaaaaatatattttggtatatttataccaaagatatataaaaatatatattttggtatatttataccaaatatatataaaaatatatatatataggtatatttatacctatatatatatattttggagacagagtctcgctttgttgcccaggttggagtgcagtggcactatctcacctcactgcaacctctgcctcccgggttcaagcgattctcctgcctcagcctctgaagtagctgggactacaggcacgcaccaccatgtccagctaatttttgtatttttatagagacggggtttcaccatgctggccaggctggtctcaaactcctgacctcaggtgatctgcccaccttggcctcccaaaacactgggattgcaggcttgagccaccgcacccggcctatattttttatttcttaccctccaaggtaactgaatcttatagtaacaggtatattttgaaccaggagtagaaacatactaaatatctcaggtttttaatgaatttgataattactgtgccttaatacattaaggaaattttgatgattagaaaaactttgaatactgaatttgttttgtgaaatgtatataagtagttctattttgtttattagtagtagctaacaagcatgggcatttcttatgttgtatagataatggaattttgtgatgcctaaggcagcagaatatttttctgaactattatagtgactggatattgaaagctatgtacataatccttctacttatttttttacataagagaaacttgccttaatgaaagttatgtgtatctttatattgtctgtcctttatacttcatgtactcagtagtaactgacatttttgtttttgtaaattaatagcagtataaaatcaagtataattctgtgatgttttaaaagttttttaatgaagcttttttggagctcagtcatttgaagattgaaataagctttctctacagtgtattggtcagagaaaagatgtgttttcaacttacaagaatgaactcttcctctttatgattttagagacatggacatgcaggaaagtagagggagttggggagagaaaatgtgaatgcgtccacctgaaatgttgaataaataatcaaataactttgttacattaaactttcctcgtcatgataatctggatggatttttaccattgttcataaacttggccaggcatggtggttcatgcctataatcccagcactttgggaggccgaggtgggtggattgcttgaggccaggagtttgagaccagcctgggcaacatagtaaaacctcgtctctacagaaaatacaaaaaattagttgggcatggtggcacgcacctcttgtcccagcttctttggaagctgaggtgggaggatggcttgagctcaggaggcgggggttgcagtgagccaagatagtagctgggcgtgctggctcacacctgtaatcccagcactttgggaggccgaggcgggtggatcatgaggtcaggagttcaagaccagcctggccaagatggtaaaactccgtctttactaaaactacaaaaattagccaggcacgatggcaggtgcctgtagtcccagctactcgggaggctgaggcaggagaatcgcttgaacccaggtgacagaggttgcagtgagctgagattgcaccactgcaactccagcctgggtgacagagtgagactccgtctcaaaagaaaaaaaaaagaatttggtgtagcatattttttattttttaaagatcattttattttaaaatgaaagtgaaacttccttctgtacgttttaagataataaactgaaagccagttcttgcctctctctccatacatgtttggccttaaatgttcaaagtgaaatcaaggttaattccaaaaggtgattgttaaaacttttgttttctaaattacatgtgtccaccctggttcttttgaatctttattgtgttatataaaatactccacaaataggaagtagagaatgtcatataccttcaccaagattctgctggcttttataggagaagctagctgcacttgaatcaagtattgaacagcgactcaagtgggcaggtggtgccaaccctgcattggcccctgtactacaagattttgaagcaacgatagctgaaagaagaaatcttgtccttaaagagagccaaagagcaagtcaggtattgtgacttacatgcaccatctttgtattcacttttacaggattagatgagtagctggaagttatatgtggggtaactaggggagcttgagagcccacgttctggctcacagccctgggaggagggacggatgggcctttcaggacatgccttaagttgaacccacagcaggttatttccttggcctttactgcctctcatttaaatattaattaaataaattcagcctctgttgaaaaataaagaggtcttaaattcatatctgtttaaggttctctgggtctcttttatacaactaaagtgatccaaagatttggaaaggtacttggaatattattttttccacatgacaataaaacgtcttaagaccttgtgccctgttggccaggcgccgtggcttacgcctgtaatcccagcactttgggaggctgaggtgggtggatcacaaggtcaggagttcaagaccagcctgaccaatatggtgaaaccccgtctctgctaaaaatacaaaaaaattagctgggtgtggtggtgggtacctgtagtcccaactgctcaggagtctgaggcaggggaatcgcttgaacctgggagccagaggttccagtgatccaagatcgtgccactgaattccagcctgggtgacagagcaagactctgtctcaaaaaaaaaaaaaaaaggaccttgtgccctgtcaagaggctgtggattgggcagggggaggagaaccaaaaaaactattacggacattttcaactaagtacaaaattggactaatacatgatactcatacttcatacctgtcgccagtgcttaataatgatcaacttaagtcttatcttatttcacccatactccctaatcctcctttctatccatatttaatagaaatcccaaatagtgcataattttatctataaatttttcagtatatacctattaagaactatttaagaatgtatcatagctgggcatggtggtatgtccctttagctctagctgctcagaagtctgaggcgggaggatggcttgaagctaggagtttgaaaccagcctgggcaacatagcaagacactgtctctaccaaaaaaaaaattttttttgttttttttgagacggagttttgctcttgttgcccaggctgtagtgcagtggcgtgatcttggctcactgcaacctctgcctcccgagttcaagtgattctcctgcctcagcctcccaagtagctgggattacaggcacccgccaccatgcccagctaagttttttgtatttttagtagagacggggtttcaccatgttggccaggttagtttcgaactcctgacctcaggtgatccgctggcctcagcctcccaaagtgctgggattacaggtgtgagccaccacacctggccaataaatttttttttttttttagctaggcatggtggcacgcacctctggtcccagctgggagactagctacctgggagactaaggcggtaggattgcttgagcccaggagtttaaggctacagtgagccataattaagccactatactccagcctgggcaacaggggagaccttgtctcaaagggaaaaaacaaaaaaactaaccacaatattaatcatacctttaaaatgagcttaatactgccagataagttaggcaagaatagaagcagaaggggaacattctgacagaagtgtcttctgaattgtggctgtaacacaaattgcagctgaatataacagctttattgtggagtaaatattctatgtaaaaacagtaatgtagaagataaatttacctaattgtttgtcagtgcttttggccatctcagacctaacagtgtcagtataaatgtacatttatttacagcctttataaggttttggtctatttcccaaacattttcaggaccaattctggtcctgaattctcaaaatgaggaagtagtattttttcatgttattaattgccacctccctttcccaccttcctcccatctcctcttgtggttccatttctgtctttacaggtcacatttctctgcagcaatatcattcattttgaaagtttacgaacaagaactgcagaagccttaaacctggatgcggcgttatttgaactaatcaagcgatgtcagcagatgtgttcgtttgcatcacagtttaacagttcagtgtctgagttagagcttcgtttattacagagagtggtgagtcttggtggaaagaaacttgattaaataaggctagtgttatactattaaaatcaatttaatatatacattccgattacattcgttgagcatatactgtatgtaagaggttgttaggggggcggggggacagtgatgattaaattattttcttagcgcccccccccgccccgaaacatattatatgtttaaaaatataaaaaatgaggaagtgtaaaggatcctcatagctacaaccaaaatactatgaaagtttagaagggaggagaaagacgatatgtagcaaatgattccaatgcactgaaaatagagcaggagaaagagggcttatggaagatgaatgctggaaaggttagtgaaggccagaaatagcaagttggtaagtttgacgtttatattttgtcagaaagcttaaagctgtatgttaggaagttcacatttcatctcgaagagttatttagaatttagggacctggattgccagtcatctttgtgattccgaatgtatttctcaggtcttaaactttaagcatttaaagcctgcatgattatgcagaaaagtaaaaatcttcatctatatttcatagattattgagattattgttaagtaacttgtaggtaattaattcatgacttagcaatggaggttctctttgtgtcagcttgagttactaatatcttttgatgatgttaatgaagaaagaactcattatttcagctgatactcgaagtcaaacaaatgcttgttctatttaggacactggtcttgaacatcctattggcagctctgaatggcttttgtcagcacacaaacagttgacccaggatatgtctactcagagggcaattcagacagagaaagagcagcagatagaaacggtctgtgaaacaattcagaatctggttgataatataaagactgtgctcactggtcataaccgacagcttggagatgtcaaacatctcttgaaagctatggctaaggtaagactaataccatgaacacacatttactctccctctgttataaaatttacaagtagttttatttataggaaaaacagtgacattttgtaaataacaatttatctcatcacatcttccaatttgtttgtaactgagttaacttgtgttttcatcaactattttttaaagccagtagtagtagtttgaatttcatacacagagaagctaaggcttaattagattcctttattgtgatataacttgtaataaaaccaagatatgaacctagtctgagcattcagatatccagcttgtctttctctttcttagctataccaacaaacccatacagtttgcctccaaaatgaatgaaatgttgtctcttccctccagtgttgtacatagtctagtaagtaagaaaactaagcctccagaaaaggctattacttcatcattacaaacagtaaataatttaattttagaatttacttttactttgaatttttatttgatggtggaaacaaagttcctataaaaatggagttgaactaagcagtttaaacacactcatatttgaaacatttgttacttaatcactaggtgactgtcttgagagtaattactgatactaaaactatttttcttaatcattaatttatcaattctaggatgaagaagctgctctggcagatggtgaagatgttccctatgagaacagtgttaggcagtttttgggtgaatataaatcatggcaagacaacattcaaacagttctatttacattagtccaggctatgggtcaggttcgaagtcaagaacacgttgaaatgctccaggaaatcactcccaccttgaaagaactgaaaacacaaagtcagaggtaagaatgccttctggtcagaatttataaaacataagtacaaaactactggtataagaagtttatctcttgatttaatttttcagttttgttcatatttttataagtagtatcaggtaaaacatttcgtaaataagccattttattttgtatttcagtatctataataatttagtgagttttgcatcacccttagtcaccgatgcaacaaatgaatgttcgagtccaacgtcatctgctacttatcagccatccttcgctgcaggtaggagaagagtcctgagtcttgatctgttgttaatgttacacatagatgctaagatgtttaattatacataactgtctaatattaaacacttaaggcctgtcattctataatcttaaactgaacagattttagcttatccttaaaaatactcgtaagccaggcacgatggctcacacctgtaatctcagctacttgaaggccaaggtgggaggattgtctaaggccaggagttcaagaccctgtctctttaaaaataaataaataaacagctattaaaaaaaaaaaaaaaaaaaggccgggcgaggtggctcacacccataatcccagcactttgggaggctgagccaggtggatcacctaaggtcaggtgtttgagaccagtcgggccaacatggtgaaaccttgtctctactaaaaatacaaaaaaattaagctggggtggttggtgcagatgcttgtagtcccagcttactcaacgagtgagcagggaaattggcttgacccgggaggtgaggtacggagcagatcgcatgactcagtgggtgaaacatctgtcaaaatgaatcggagagagtaaaaatgctttgctaatttgaatagttttctttaaaaaaattgtttttatttttgtttgaggcggagtctcaaaactgtctcttgtcgcccaggctggagtgcagtggcacagttgcggctcactgtaacctccaccccccagattcaagcaattctcctgcctcagcttcctgagtagcttggattacaggtgctcgccaccatgcctggctaaaaaaaatatatatatatatcagagaaacataggaaaatacttaatacaaatgaaaaatttgtagttccattccaaatagaggcagaaaccactctgcatttgttgatttacttgctgtgcatatgtacacatacacaaacacattgggatgattatgcaaatgtaatttttgttgcctttttccagttaataatttttcagtcattaaataatctttttaaaaatgacttaatggccaatttatttttattttttattttcttatttatttttattttattttatttttttttaatttaatttaattttttttttttttttttttgagatgagtctcactcagtcgcccaggctggagtgcagtggcgcaatcttggctcactgcaacttccgccttctgggttcaggggattctcctgcctcaacctccccagtagctggaattacaagaacctgccaccacgccctgctaatttttgtatttttatagagacaggattttgccatgttggctaggcttgaattaattcaagatggattaaagacttaaatgttagacctaaaaccataaaaaccctagaagaaaacctaggcaataccattcaggacataggcatgggcaaggactccatgtctaaaacaccaaaagcaatggcaacaaaagccaaaattgaaaaatggaatctaattaaactaaagagcttctgcacagcaaaagaaactaccatcagagtgaacaggcaacctacagaatgggagaaaatttttgcaatctactcatctgacaaaagtctaatatccagaatctacaaagaactcaaatttacaagaaaaaaacaaccccatcaaaaagtgggcgaaggatataaacagacacttctcaaaagaagacatttatgcagccaacagacacatgaaaaaatgctcatcatcactggccatcagagaaatgcaaatcaaaaccacaatgagataccatctcacaccagttagaatggccatcattaaaaagtcaggaaacaacaggtgctggagaggatgtggagaaataggaacacttttacactgttggtgggactgtaaactagtttaaccattgtggaagtcagtgtggtgattcctcagggatctagaactagaaataccatttgacccagccatcccattactgggtatatacccaaaggactataaatcatgctgctataaagacacatgcacacgtatgtttattgcggcactactcacaatagcaaagacttggaaccaacccaaatgtccaacaatgatagactggattaagaaaatgtggcacatatacaccatggaatactatgcagccataaaaaaggatgagttcatgtcctttgtagggacatggatgaagctggaaaccatcattctcagcaaactatcgcagggacaaaaaaccaaacaccgcatgttctcactcataggtgggaattgaacaatgagaacacttggacacaggaaggggaacatctcacaccggggcttgttgtgggtggggggacaggagagggatagcattaggagatatacctaatgtaaatgaagagttaatgggtgcagcacaccaacatggcacatgtatacatatgcaacaaacctgcatgttgtgcacatgtaccctagaacctgaagtatagtaaatgtgtgtgtatatatatatgtgtgtgtgtgtgtgtatatgtgtatatatatgtgtatatatatgtgtgtatgtatatatatgtgtatatatatgtatatatatgtgtgtgtatatatatgtatatatatataaaatagttcacaaagattaacacgtggatacccaaaatgtcatattaccattgtatattttggtaaattaatgtttatatttcacttttattgaatttaataaattcctgacctcaactgatccgcccacttcagcctccccaaagtgctgggattacaggcgtgagccatcatgcctggctgttatttatggtttttgatgccacaagcctagtaaacataattgtacaaattcatacctgaatgtctggctgtttttaggctacatttttaggaagacaattgctgtgtccaaggataaggatttatagttgattatttaattggggtatcaaccactaccacctatcccgtgcttgctccactctgccccctccatgttctgtttacatgtaaattgagccaccaactctttctctgtagcagtccggagtaacactggccagaagactcagcctgatgtcatgtcacagaatgctagaaagctgatccagaaaaatcttgctacatcagctgatactccaccaagcaccgttccaggaactggcaagagtgttgcttgtagtcctaaaaaggcagtcagagaccctaaaactgggaaaggtaattagttagaataaagatgccttaaatttttatataaaatgacggtttgacttacgtatgtttttgttgcttcatagcggtgcaagagagaaactcctatgcagtgagtgtgtggaagagagtgaaagccaagttagagggccgagatgttgatccgaataggaggatgtcagttgctgaacaggtgaccgtgttttaaacttgggctacacattttaatgctgctggaaaagtagaggtgtataaagatccctctcatcgatttccttaatagttcatcaaggaacttaaatgtgttttcaggattcagaagattttgagtaacacagctctggcgtcgtcaagtagtcaccattttactctgacccttccctatgagcactttcctttcccctagccctgttttaacccaaatataagtccgatcctcctccaccagactacagttagtttccatttaaagaagactgttgaaggtttcaaatgaaatgccaaggaccctttgggttgcaggtgtagtatgagtggagcatccctaattagaaactcatatgctccaaatccgaagcattttgagagttgacatgatgccataagtgaaaagttccatgcctgacctggtgatggatcccagtagtgaaaatctagtcagaacctgtttcatgcacaaaatcactgaaaatgtataaaattaccttcaggctatgtgtataataaggcataagtggattctgtgtgtagacttgcatcccaccaccaagttcctcattatatacatgtatatattccaaaatctcaaagaatccaaaatctaaaactacaggtcccaagcattttggataagggatactcaacctatgtttgtaaagcatctttgggtatcgggacatttgtctgaagtcattattctgaaattttttcattagtcttactaatattgaatatataaatttgagaataaagctacagaaaagttataggaatgcccataaacgttttacctagactcaccagttaacaatttcccatgtttcattgttctgtgtgtgtatgcacacacagtttttctgaacaatttgagggttctttgcagacatcttagcacttcatgcctaaacttcaccatgtgtctcttgaacaaaatactataatactgtagctactacataattgtcaactcaggaaacttaacattgttgtaatactattatctgacattcagtccacattcagatttctccaattatctcaaaatatcctttattgcttattcctcctctctgaaccccctgttcctccgaccttcaagatctagtcaaggatcatcatgcattttgtgtatagatagatggtcctccccttatggagtgacatcccaataaatccataagtctaaaatgcatttaataccccgataaacccatggtgaggtaaaaaatggtcattcagatccactgtgagtcagggactgtccatccttgtcctacttcttgatctgctttaatatctagaacagttcctgagcctttccctcttctcttccgttgatatttttggtttgtctagattagttggtttacagaatgtgcctccatttatatttgtctgatattttcctcataattcaattcattcaagattttttttggaaggaatgcaacatcagtgatgtttctttctcagtattttacatcaagagacacatgtcagtttgtgccatctttggtggtgataagctagatcatttggtcaagagaggtatcctcttgatgtcttcattataaatgtacatttttttcctgtgggataaaaattaagagactgaatatcctgttcttccatggtttggcatccgtaattcaattttaacatcagcaaggaattttttttttcttttaaacactattatattcttgtataggacctagacttgaactcttcttgggcaagaatttttttttttttaagaaaccgttttgtcaagtttgtcaaaaaccatgagagattttctgagtttgggatatttttacttaagaaacgttctggtaggttaatggattgtgtgcttttcatatctttataactgtcttagctctctttttaaagtatacttggttattgtgctttttattctgatagttattacattttatatgaaaattaaggggcttacaggagcagggtaagtatagagtcctttgcacttaacttttggcataatttgtctgctgattgtaattcagcagacaattgaaaagctttaaatgactttacatactatcctgcctatttttacaggttgactatgtcattaaggaagcaactaatctagataacttggctcagctgtatgaaggttggacagcctgggtgtgaatggcaagacagtagatgagtctggttaagcgaggtcagacatccaccagaatcaactcagcctcaggcatccaaagccacaccacagtcggtggtgatgcaactgggggcttactctgaggaaacctaggaaatctcggtgcactaggaagtgaatcccgcaggacagctgcactcagggatacgcccaacaccatggcctgcaaccccagggtcaagggtgaaggaaagcaagctcaccgcctgaacacggagattgtctttctgccacagaacagcagcagacgtgtcgggaggttagctgcggaaagaaatcgggatgccgcggagcacagagtgatttggaactccattccacctgaccctgtgtgtacaatccaggaaaaaaacaaaccccactcagaaacagagaaaactggggtcgcgaagaaatcacagccaaggaagatttgatgcattcagattctcgtgtaacacttgttgcttggcaacagtactggttgggttgaccagtaagtagaaaaaggctaaaggctatgcgatatgaatttcagaaatggactgaaaatggagagctatgtaacagatacactacagtagaagaacttacttctgaaatgaagggaaaaaaaccaccccatcgttccctactcctccccaccacttacccgttccccctttacctaatctagtagattagccatctttcaaattcacttttatttcagtccttatatttcatatacttccgtctcgatgctgttaacaacttctgataacatggaaaattcaaggattgtttaaaggtctgatgatcacacacaaaatgtaattccggttatttaagtcatttctgtgattctatcatgtacagtttccagaattgtcactgtgcattcaaaagtaatgaatctaacagacatttgatttaatgtacactcccttttgcttatagtgtgcattttttttggaggtcattcaaattttccctcttctgtgatagctgtagtttctttcatagaaagtagctaatccagtgtaatcttttacctttttaaaaaccaagatagagtatctattagagttttacattgttgatgatagattaacaataaagtgatgttctggtggaggtagactgaaatttttttaattcatgtttttcatttgatacttttaatttacacttagtaaattaaaagttgtttaatttacttggcattttaggacatgtacatgaaacagtgaaaatgagatccaccaacatcttttattaagttcagttattagtctgtgaagtgctttactttttgcacaattttaatagcttgctattcagtaatacattatagtgaattcatgatcaaggtttccttaaatttagcattgcatttcagtactgactgtgtaagctaaattgctgatccaaaataaaaacccagactagaatagggttcttaaaatcaagtatcaatacaaaatagaacacaattaaaatcttaattgttggctgggcacagtggctcacgcctgtaatcccagcactttgggaggccgaggcgggcggatcatgaggttaggagagcgagaccatcctggctaacacggtgaaaccccgtctttactaaaaatacaaaaaaaattagccgggcgtggtggcgggcgcctgtagtcccagctactcgggaggctgaggcaggagaatggcgtgaacccaggaggcggagcttgcagtgagccgagattgtgccactgcactccagcctgggcaacagagctagactctgtgtcaaaaataaatgactagataaaaaaaaaaattgtttgagtacattttccctgcattttagagattaggacagtggtcactttctagttgccgtcttcacagacaaacttgaaaggtattaaggaaaaaattccacatagctctgggccttttttgtattctgattgccacgttaatctgtaatcgttaagtacccatgaaagaatgtgtttcagtatcagtgcttttttggtactttaacaagtattgtaggcacggtggatttttttgaaatacccatgtgtccaatagcaagttaaggaacctagcgcatcaaattttgttttcttcattcatttggaaccttattttcgcaaaaaacctagctggaataataatgccatattgtattttgcacactgctttattttctagaggctctgggagcaaattacattcatcacattacctctgctctctcaagattaaagtctttcagcaacattctttattgtcatcataaggaaaaacttttatcgcaatgatagtcagttcacattagtttagcactatagatagtattcagaaattgctttctctttggtaaagaagataaataggtgaattttattgcctgtgttttcaggcttcagaggtacctggcaccttactcaagcaaaaacaaaaaacagctttacttcaaaagcatgtgcctctggtaaattatccatcacttttgttttaaagtggtccctccaagaataatgtggcatacacagtgggtttggttgtaaggcagatgtaatagatgacttcaaaagcctgctccttactgcactctggacaaggccctggtctgtatagtttggcttcctctgttaagtcattctacaaggtgacttgccatttgaactttcgtaagagacctcagcagttagactgagaaaagttagagtgctgtagttatgaagtcatacatttttgataaaatacctgtggaaaaccagggatcctctcctgtttctctctcttgcctccccctttccctccattcctctgtcgcctccccctctcctccactttctttaagaatcagggggtacagaataacctacaaacaacctcttcaaagtacccttggaaattgaagttcaatcttaagttttttgctgtctttaatttactagaattgcctaatttttagttgatttctctacagagcttagcttgtgtagttatttctcttttactgttgctttggtgtgtcttgaagtttgattgattatttttggtcattgagttcttagtgtagtttgctagatgattattaagattcttttgtgtctgacacttgtggtgagttgcttttgaaatctgttgagatttccatgtgagaactgataatcaggctcttgatctgcttccctaaattacttttttagagcccaaaccccaggtttagggtgagggtttgtaatacaaagaaacacttccatcacttctgcccttaacccttgcctctattacctaagcttagtaagtagttttcttaatattgtccaatgtttggtgttatctgcattgttttttgtttttttaattgtggttgttctgacgtgtgaaatttaaggaaagagccattttttaaaaatgccgagcagggcaatgcaagtacagccaaatattagacttgatgtgcaatcttcggtcctttttaatctggggtattataggcagtactttaaattgcaaagtcttccgggcctattttcctctacatttttgtaattaactctgggggcttacttgttttggcagtactgaaatcaaaggagctggttcttcttttctcccaattattttcatatgaaagcacctacaattagcctgttagtcctattcagatacatcaaatatcagtgaatgctttactattcgcacatttaagcatctttgttttacataaaattagagtatgaaaaccagtgttcaattttttatcttgttgagcttgtaaaatgccagcaatttaaaactaggacttttccccccataagccaaggaggtagaattactaatacaagggttaaagaaggtagattttgttttcaatatttgggtaatattagaaagattcttcccacagggaagaactagcaagtgtcccaattttttccaaacgttggggaggggaaaattcactgtatcatgaaaccctaagggtttgttgcacttcctgctttttaggcctggataacagtatcaccatccttatttacagaagggtaaaactgactcttaatgagaaaagctttataagttcaagggctgtaaaatatgaactacttagggtcgtttgccttccatgggaacttggctagacttagaaaaagctgtttgttgtgctaatgtaaaagtgtcatacaatttagaagatttttgaagatggtaaacttagaagaattctatgttctgaaatgcacacttttagaatgtttttctttgaaaacaggctaatagttttttctttttttgacaaagtttcagctcctctttaaagttattgtgtcatttttctggtttaaatttcccttatatttccacctgtaatgtcagtggcaacaacatcatacttcacttacttgttaatttactttttacccttattctaagagcaagttgagttgaactgaatcttccttgtcttagtaacaatgtataaatagtggcttttctgtacaaaaggttgtaatgcctcctgatggatataattttgtgattgtatttaaaagttgaataaatcacaccagcttcctgaaaatgttcataatgcatcttttggaaaacaaatacatgcctactttgtgcatatttgcattaacatggcaaagattgtatgaaatacctgtttttcagaaaataaaggttcagtctcaaaagatacagcatttaagttctgaatttattggtcaaaatagattttggaaaacttgaaaccttttggaacctgggtagcttgaaaaaacaaaacgacagggtctccctatgttgcccaggctgatctcgaactcctgggctcaagttacactcccacttcagcctcccaaagtgctgggattacaagcctgagccactaagccgagccaagcctagtcttttttttctgaatagcactaatacctcaaaaaagacccctaaattctcagaaaagtaactattttattctcaaacatctgttgtatttttgaatagcagtagaaattctacttcaacgataaaattctttgtgttaaggcccaatttataaagcttaattttggcagtatttaaaaacaaaattcccgtagatcattattgacagataggtgcattccttggagtgtgaaacctctgaaaaaaaatagaaaatgtccagcttggctttatatcttggagattgcatttgttgctgctaaatgaagttagtaagatttgtgttaactgcttagtcatctggcacatttcaaaagatcacatcctgtctctgtaggacaaaaacaaagctctaaagaaagctatgttaagggtgggtgttttttaataattagaccaatcggaaatttagtgagagaccatatagcagggctgtgcatttagaaataggtatgggaatacattgttaagtaacaaaaaatactaagtggagaaactgctgtttcagttgcttctgtttttttcacctaccttcatttcacaagctggtgttaacaagtcttaagttgtgcatggaaaacttgggtgaaaacaagaagcatattctgcagcaaaagctgatttcccaaaagtagaaatgtcagttttaaaccctaataaaataccctctcttttggaagtggctattactgtgggtctagcaagatcacatacccagtgctcaacatattcactaattatgtggctgctgattgcttcgatctttttgacttttttttttttttttttttttgagacaggttttttgctctgtcacccaagcttaagtgcataggtgcaatcatagctcactgcagcctctatttcctgggctcaagggatcttccctgcctccccatttgtatttttttttttttaggggcgtggagaagaacctgctcctcagactccatagctttaaaatctctccaaatagcgtctctgtcaactggctgtatcctgcctttacaacttctttaccccaacattctccaaagtggcactttattgaacagtcagcttcccttgcaaagactttttttcaagtgcttctccctgattcagatacttcactcccctttccccgaaagacccacagcaaattgacacccttccatgaaattcacaatgctcctgcccttgcccagctctcttaggggcagtatgtggtctgcagctatgttctctcacatttatgacttccttgaacatttaagaacctggtggttacttaaggaacattttaaaaataaatttaaattcaatggccgaatacaaatgaccatgagattggaagttaaaacctgtaaaaaagataaaaggttggaagttaaaactatagttaattcacctgaaacaaacatctgatccggacatttggcatgattctgtttgtatcaaacgatgaaaaatcggccgggcgcggtggctactgcactacagcctgggcaacagagccaggctgtgtctcaagaaaaaaagaaaaaaaaaaaaaaaaaaaaaaaaaaaagatcaaagcacttgttactgcatttgaaatcctggatagaaaagatgtacaagtgcctcaacacagttcctaaactgcctaggaattctactgcttgtgagagggtttacatattttcttagcttgacctctaatggaagaaaggtcgtgtcaagaactatccttttggccgggcgcggtagctcacgcctgtaatcccagcactttggcaggctaaggcgggcggatatcttgaggtcaggaggtccagaccaccctggccaaaatagcgaaaccccgtctctattaaaatacaaaaattagccgggcgtagtgacgggcgtctgtaattccagctactcgggaggctgacgcgccaggatcacttgaacccgggagatggaggttacagtgagcagagatcgcgccactgcacttcagccggggccacggagcgcgagactccttcgtctcaaacaaacaaacaaacaattctggccgggcgcggtggctcacgcctgtaatcctagcactttgggaggccgaggcgggcggatcacgaggtcaggagatcgagaccatcctaacacggtgaaactacgtctctactaaaaatacaaaaaattagccaggcgtgttggcggacgcctgtagtcccagctacttggaaggctgaggcaggacaatggcgtgaacccgggaggcagagcttgcagtgagcaagatcgcgccactgcactccaggctgggcaacatagcgagactccgtctcaaaaaaaaagaaaaaaaaaaaaagaatccttttggagagggagcttgtagtttaagtaacttaaacatccacgtataataaagccacttagaaggcggtgcattttcacacgttctcaaaccaggcctgggtttttccgcgcaagctaaggcctcattcctactgggtaggagagaaacattgcagcaaaatccacacaaagagctcttttcacttgtcctcaaaacctcacgggtcgcaaatccgggctaaacggctcaggggcctggctggggaactgggccgaaggtggaacggatcccagccacctcggggccaggaaaagatgaagtgtcgcaggcccggcgtccccgccctccgcctgaggcaacggagcatctctcttcgagtagcccattttccagagagtctcctcggctgcgaaagccagacgaagagggacccaaagccaccgcagcggcaagagccggagaaccactgagggacagcgccccctgcagcggcggttgaaccgcttcccacagcgctgggcggggcgtcgcgcagtccctgggcgctgattgggcactccgtgtcccctccccctcggcccggcgctgcctctgtctcctttgacctcgatttcaagccatgcgctgagcttcggttggcccggcttccttgaggcgtaagctcggtctgtccaatgaggagcgagcgtcgcgggggccgtcgggaagggcggccgacccatataagcagcctgcggggcgttccctcgggttgtggttggtgtgcgggtttcggttggaggactcgttggggaggtggcctgcgcttgtagagactgcatccccgagacgatggcggagggagataatcgcagcaccaacctgctggtgagtcctggctgcctgtcccccgggagccgagcgaggcctccagacgtccgtgggctcaaacaccgcggcctcgtccctgtcacccgccgcgggcccggcccttctctccctgggcaggcgacgatgcctggccctcgggcttcttgggtgactcctgggtgtcgaacccttacctttcctggggacggtgcgcgacggggcgaggagggcgcgtgattcatcaccgcgagtaggagtcgaggaggaagtgggaggcagaggggctgcgacactagcctggggtgcgggtgggggcagaaggcctcctggggcctgtccagcgctttcgcggctcaggccccagccgtattcggctttccccgtctttgatcttaacctggatgtgcctgccttcttttccccctaaaacttggacaagggtggagggtcaaagggctactgcccagaatttatcttagagctggtacaacttaaaacgacagggaggctgcgagctcaccgtggggaaccgggagcggggtccagctgaacagacaatgggatgtcttggcgtttgtctggaatttggaagtctggcgggggtggggtcacaggactactggaaacagctttagagtaataagcagggatccgaaggaactgcagtgagatggtatcataggcggacacatttttatttgttatgaatttaagcgcaccttgtgggcaaaaaacaagagaaatatccttgcatattctcagttgcccttccctggtgactgtaggtcacataccagcaatgaaaaacggaaccaaagaatttacttaggggcttttgaacttccaagaccccagacgctggccaatgacgtgacttcagggcagttttgattgtgcgtgattttatatttgcttttagaaatgcatggtttgttcctttaaacacacgctccttctagcatagttagttctcagcgtggatctttttaagaggattaattgaagcacagagaagtagctcaagccctgttgaaatgacaaatcctgggctagagctcctgcttcccaactctccttccagcagagcaatataactctaaggaaagcaacgcctttggtcgtggatttcttggatgcagatcagttaacctctgtatctgtttcctccttggtaaaatggggacagtaataacacctttttttaagggttgttaggaagattaattgaagtataaatatgaatgctcagcagagtgcccacacatagtagtctctttcactagtattaagcatggaatataaagtcagaaatattgagatcacactagtgctcagcgtggcacagatagcgagcgtctttgttaagattaagtgccttgttctgtcatttgcatgatttccagtgaatgacttttacaaagagacaaggtctcagcccaggctggtcccgatctcctgggctcaagcaatcccccccgacccgccaagtgctgggtttacaggcgtgatccactgcatccagcctgataacatagagacacttgagtttcttattctaaatttttcttcctttaccaaaaccagctttaagggcttttgccacattagctcatcctagaggcccactttcggctgttcagagtcagagaaatttgaagtataatcaaaatgacatcctgagtggtaagaaacactgtattgaggaggtatattgaccgtaaaatgccaccttaatttggtgaaagtagttttccttaattgtccaatgaatgtcaacatctgagtgattccattacacaaagagctattttagaaattgaatgctattcagggaaagtctttcctaatggatttagaagggtttaaatcaataagatgacaaaaacaacggatcaattctaaccatctgaaataaacaaacttaaaaaaagttatttcattttattaatactctgggcactgccacgattccccgcatgactttgagaaagtaaaccattttgagctcactttctttaattgtaaattgagtctaattatccctaccttgtggctctctgtaaggattaagttacatcatgtatataaagaatagcccagtgcttggactagaaaagtgaccattaaaggatatttaggctgggcctggtggctcacacctgtaatcccagcactttgggaagacgaggtgagtggatcacttgaggtccagagtttgagaccagcctggccaacatggtgaaaccctgtctctacaaaaaattagtcgggcgtggtggcgggcgcctatagtcccaactactcaggagtatgaggtaggagaatcgcttgaacccaggaggcggaggctgcagtgagccgagatctccccactgcactccagcctgggtgacagagcgagactccgtctcaaaaaaaaaaacacaaaaaacaaaaaaacccattgtattttcatctttgaaattgcagtttttcagaaaccaactagtttaaaattggcaatttggttaagaggttattttttgtatttggagctttaaaataattgaagtctatgaaccacaaaaatgttgagagtggtaaaatgatcactttaaatgtcggtggtatttaggctgcagagactgcaagtctggaagaacagctgcaaggatggggagaagtgatgctgatggctgataaagtcctccgatgggaaagagcctggtttccacctgccatcatgggtgtggtttctttggtgtttctgtaagtgagctattagattactatgggttgtgcttcttattaataaagactttttaatatatagcttctgtttgtgggagtgccttaagtcttctgtaatatataacccataaagaacccataaagaatgtttctcataagcacttctagtttccagaatttgtagtacttctgtaaacttggtaacctaaagcacttgagtaaatcagtgactcgcaaactttttgtcctccagacacttaaactctttttttgttattatactttaagttctgggatacatgtgtagaatgtacaggtttgttacataggtatatatacatgtgccatggtggtttgctgcacccatcaacccttcatctacattaggtatttctcctaatgctatccctcccctagtcccccacctccctaaactcttaaaaaagtgctgagaactccaaagagcttttgtccattgatatatacttaaccactgcagctatgatatcagcatgtcacaaagcctctggaaagccacttgtgagaaaattagaagaaaaatggcaaatatctctgagaggcggtgaatagttaagtgaatagttaagttagacatgtttagttaggaataataatgactatgtttttctaacctttattaatttttttaacaggattatctactatctagatccatctgttctgtccggcgtttcctgttttgttatgtttttgtgcttggctgactaccttgttcccattctagcgcctagaatttttggctccaataaatggtaggtagcataatgatttggcagtctcatttttgtgtagttactgaacttggtggctgtgattagtatgctgtaaataagcagagataattgtctaaccatcagacacctaagcattagatttattgcttttatgtgaagaatattgtaactgatttgaatataaactatgaattttctgtactccatagttcttttatggtaaatgcacatatacatttttacatttccattgatatttaggatagtataataacttcacaaattatttttgaatgaatacagaaaaggaaactggcagattttcattcacattcatttagcaattatttattaaatgcctactgtggcaggccctgtaaagtactgtgaaatattttgacttttaagattgatcttgtgttaaggctgagatactgagacactgaggcagtggaatggcagttaacaaagtgaataccaagtgtttccgaagaggttcaagctgtatacacatgggttgctgattttatttataccattctcttttttttttttttttttgagatggaggctcgctctgttgcccaggctggagtgcagtacgctcttggctcactgcatgctccacctcccaggttcatgccattctcttgcctcagcctcccgagtagctgggactacaggtgcccaccaccacacctggctaatttttttttttttatttttagtagagacggggtttcaccatgttagccaggatggtctcgatctcctgaccttgtgatccgcccgcctcggcctcccaaagtgctgagattacaggcgtgagccaccgtgcccggcctatttataccatgaggttgcttatgaactcctcagatatagttaagtggataaggatcatattaaaagtattttaactttctctagcatgttgagttttgattcaaataatcagccaaaatagaagttggaatagatattttcttctcagctgctattctatccttggctgtttattttatttggttagtattctacttgtgcctttggttgtttgtatctcagaggatagcaaattgcaaaataattctgtaaatataagaattttaaatgtgtaccttatggatctttaagaacaaattcaaagtttgcttaaattatgatataattgacaatatttaaaggtgtttcccccaacagcagaatggattagtgttaggaactgtccaaattgtttttcacttgcagtaatgaatcaatgttgttggctcttttgggcaagtttctgaatgtgcagtataacagagttagcaaaggaaataaatcactgaccttggccttattagccagataacattccagtctgctaatttataactcctagaggaaagtttgcagaaataaccactgatagtttcgtgatgtgactcagttattgatagagcagattttgtttattttttgatcttacaaggaagaaagaatactcttttgcatagccacaatctagccttgaccatgggcaagaaataacatctcattgttgaaaagaagttccagggctcagcagaaatccttgtactttatctatcactgcagttttacagagatgagggctagagaagagaaggcaacacatccctcagcacagggcaataatagcagccattatagctgtgtagcgaagacagtgcaaaggcaattaaaaaaatcagaaccaagaaaaacattataaatataaaaggttttcttggagggtctcttgttggatttttactgctgtgttgtttgttgattatattttccctccctaggactaaatttacaaagaagaatttagatttgagctgtttattgctgccttgtcatcagatgtatgaagcccagttgggggtgttatgtgttaaatgccagtagttagtatcttactaaggagtgttcaaatacagttgttcggtgggattctggtaggtatagtgcagcatttactaggatctaaagaatatttaggaatagcaaaatcaaatttatactgatttctttatggcccatagaagtcatgagtcttttactaccattaaataaatgtggcttcagagccagagatgatcctttctttatcacacgcacacacacacacactctctctctcacacacatagtttatgtaaatacttactcctgtgctataaaaggtgtcttaatggtggaaggattttttcacctacataagataatggtgaaacattgtttttatttttattttctttagaagatagctcttaaattgaacagggtgtcatgtttttgtctactgtaacgatttgtttatagcaaaaggcaaatttcttttctaggaccactgaacaacagcaaagattccatgaaatttgcagcaatctagtaaaaactcgacgcagagctgtgggttggtggaaacgcctcttcacactaaaggaagaaaaacctaagatggtactttttttgctttgacttaagtacagtaaaattttaagatttgagtcaattcgcctttttgtcttaatagctataatttgaaaattattcattggttaattcctaagtacattcataaatgtttacctgtattaattagactgaatcattttaaagttaaaaattacatttttgcatttaattttttattctaataaaacaaaattcttctgtttcatttttcttactgaaataatagtaaaagacatatacttagaaagcatctgtttaggccgggcacagtggctaatgcctataatcccagctacatggaaggctgaggatcacttgagccctggaggtcgaggctgcagtgagctgtgtttgcgcagtgagctgtttgcaccactgcactccagcctttgtgacagaatgagactctgtctcaaaaaaaaaaaaaaaaaaggaaagcatctgttcatctgttctcttatctgtaagcttcacgtcgtgaggctgttccgtgaagttattaactgaaaagat

SEQ ID NO: 188 - DNA, 15975 bp, Homo sapiens
gcggcgggcggagccgggaggcggggaagcagtggccgtgtgagcgtgaggagctgccgccaccgcctgctcctcgtcgtcctcgtcctccggggccccggcgacgtgggccgcgcacggccctggaaaagacgtcgcctccccttcatccgcctctctctcaccgcgccgctcccgcctcctcgtcctgcgctgcgggctcaggcggaacccggaacggccgtcctcttcccccgccctccgccgcctcctccttctcctccttctcggcttcctcctcagccccgggccggagcggggtgtcggcggcggccggttcgggcggcggcgcttggccatgtcgtgtcggggaaggtaatgagccgcagagccccggggtctcggctgagcagcggcggcggcggcggcggcaccaagtatccgcggagctggaatgactggcaacccagaactgatagtgcatcagccgacccagataatttaaaatattcttcatccagagatagaggtggttcttcctcttatggactgcaaccttcaaattcagctgtggtgtctcggcaaaggcacgatgataccagagtccacgctgacatacagaatgacgaaaagggtggctacagtgtcaatggaggatctggggaaaatacttatggtcggaagtcgttggggcaagagctgagggttaacaatgtgaccagccctgagttcaccagtgttcagcatggcagtcgtgctttagccaccaaagacatgaggaaatcacaggagagatcgatgtcttattctgatgagtctcgactgtcgaatcttcttcggaggatcacccgggaagacgacagagaccgaagattggctactgtaaagcagttgaaagaatttattcagcaaccagaaaataagctggtactagttaaacaattggataatatcttggctgctgtacatgacgtgcttaatgaaagtagcaaattgcttcaggagttgagacaggagggagcttgctgtctcggccttctttgtgcttctctgagctatgaggctgagaagatcttcaagtggatttttagcaaatttagctcatctgcaaaagatgaagttaaactcctctacttatgtgccacctacaaagcactagagactgtaggagaaaagaaagccttttcatctgtaatgcagcttgtaatgaccagcctgcagtctattcttgaaaatgtggatacaccagaattgctttgtaaatgtgttaagtgcattcttttggtggctcgatgttaccctcatattttcagcactaattttagggatacagttgatatattagttggatggcatatagatcatactcagaaaccttcgctcacgcagcaggtatctgggtggttgcagagtttggagccattttgggtagctgatcttgcattttctactactcttcttggtcagtttctggaagacatggaagcatatgctgaggacctcagccatgtggcctctggggaatcagtggatgaagatgtccctcctccatcagtgtcattaccaaagctggctgcacttctccgggtatttagtactgtggtgaggagcattggggaacgcttcagcccaattcggggtcctccaattactgaggcatatgtaacagatgttctgtacagagtaatgagatgtgtgacggctgcaaaccaggtgtttttttctgaggctgtgttgacagctgctaatgagtgtgttggtgttttgctcggcagcttggatcctagcatgactatacattgtgacatggtcattacatatggattagaccaactggagaattgccagacttgtggtaccgattatatcatctcagtcttgaatttactcacgctgattgttgaacagataaatacgaaactgccatcatcatttgtagaaaaactgtttataccatcatctaaactactattcttgcgttatcataaagaaaaagaggttgttgctgtagcccatgctgtttatcaagcagtgctcagcttgaagaatattcctgttttggagactgcctataagttaatattgggagaaatgacttgtgccctaaacaacctcctacacagtctacaacttcctgaggcctgttctgaaataaaacatgaggcttttaagaatcatgtgttcaatgtagacaatgcaaaatttgtagttatatttgacctcagtgccctgactacaattggaaatgccaaaaactcactaatagggatgtgggcgctatctccaactgtctttgcacttctgagtaagaatctgatgattgtgcacagtgacctggctgttcacttccctgccattcagtatgctgtgctctacacattgtattctcattgtaccaggcatgatcactttatctctagtagcctcagttcttcctctccttctttgtttgatggagctgtgattagcactgtaactacggctacaaagaaacatttctcaattatattaaatcttctgggaatattacttaagaaagataaccttaaccaggacacgaggaaactgttaatgacttgggctttggaagcagctgttttaatgaagaagtctgaaacatacgcacctttattctctcttccgtctttccataaattttgcaaaggccttttagccaacactctcgttgaagatgtgaatatctgtctgcaggcatgcagcagtctacatgctctgtcctcttccttgccagatgatcttttacagagatgtgtcgatgtttgccgtgttcaactagtgcacagtggaactcgtattcgacaagcatttggaaaactgttgaaatcaattcctttagatgttgtcctaagcaataacaatcacacagaaattcaagaaatttctttagcattaagaagtcacatgagtaaagcaccaagtaatacattccacccccaagatttctctgatgttattagttttattttgtatgggaactctcatagaacagggaaggacaattggttggaaagactgttctatagctgccagagactggataagcgtgaccagtcaacaattccacgcaatctcctgaagacagatgctgtcctttggcagtgggccatatgggaagctgcacaattcactgttctttctaagctgagaaccccactgggcagagctcaagacaccttccagacaattgaaggtatcattcgaagtctcgcagctcacacattaaaccctgatcaggatgttagtcagtggacaactgcagacaatgatgaaggccatggtaacaaccaacttagacttgttcttcttctgcagtatctggaaaatctggagaaattaatgtataatgcatacgagggatgtgctaatgcattaacttcacctcccaaggtcattagaacttttttctataccaatcgccaaacttgtcaggactggctaacgcggattcgactctccatcatgagggtaggattgttggcaggccagcctgcagtgacagtgagacatggctttgacttgcttacagagatgaaaacaaccagcctatctcaggggaatgaattggaagtaaccattatgatggtggtagaagcattatgtgaacttcattgtcctgaagctatacagggaattgctgtctggtcatcatctattgttggaaaaaatcttctgtggattaactcagtggctcaacaggctgaagggaggtttgaaaaggcctctgtggagtaccaggaacacctgtgtgccatgacaggtgttgattgctgcatctccagctttgacaaatcggtgctcaccttagccaatgctgggcgtaacagtgccagcccgaaacattctctgaatggtgaatccagaaaaactgtgctgtccaaaccgactgactcttcccctgaggttataaattatttaggaaataaagcatgtgagtgctacatctcaattgccgattgggctgctgtgcaggaatggcagaacgctatccatgacttgaaaaagagtaccagtagcacttccctcaacctgaaagctgacttcaactatataaaatcattaagcagctttgagtctggaaaatttgttgaatgtaccgagcagttagaattgttaccaggagaaaatatcaatctacttgctggaggatcaaaagaaaaaatagacatgaaaaaactgcttcctaacatgttaagtccggatccgagggaacttcagaaatccattgaagttcaattgttaagaagttctgtttgtttggcaactgctttaaacccgatagaacaagatcagaagtggcagtctataactgaaaatgtggtaaagtacttgaagcaaacatcccgcatcgctattggacctctgagactttctactttaacagtttcacagtctttgccagttctaagtaccttgcagctgtattgctcatctgctttggagaacacagtttctaacagactttcaacagaggactgtcttattccactcttcagtgaagctttacgttcatgtaaacagcatgacgtgaggccatggatgcaggcattaaggtatactatgtaccagaatcagttgttggagaaaattaaagaacaaacagtcccaattagaagccatctcatggaattaggtctaacagcagcaaaatttgctagaaaacgagggaatgtgtcccttgcaacaagactgctggcacagtgcagtgaagttcagctgggaaagaccaccactgcacaggatttagtccaacattttaaaaaactatcaacccaaggtcaagtggatgaaaaatgggggcccgaacttgatattgaaaaaaccaaattgctttatacagcaggccagtcaacacatgcaatggaaatgttgagttcttgtgccatatctttctgcaagtctgtgaaagctgaatatgcagttgctaaatcaattctgacactggctaaatggatccaggcagaatggaaagagatttcaggacagctgaaacaggtttacagagctcagcaccaacagaacttcacaggtctttctactttgtctaaaaacatactcactctaatagaactgccatctgttaatacgatggaagaagagtatcctcggatcgagagtgaatctacagtgcatattggagttggagaacctgacttcattttgggacagttgtatcacctgtcttcagtacaggcacctgaagtagccaaatcttgggcagcgttggccagctgggcttataggtggggcagaaaggtggttgacaatgccagtcagggagaaggtgttcgtctgctgcctagagaaaaatctgaagttcagaatctacttccagacactataactgaggaagagaaagagagaatatatggtattcttggacaggctgtgtgtcggccggcggggattcaggatgaagatataacacttcagataactgagagtgaagacaacgaagaagatgacatggttgatgttatctggcgtcagttgatatcaagctgcccatggctttcagaacttgatgaaagtgcaactgaaggagttattaaagtgtggaggaaagttgtagatagaatattcagcctgtacaaactctcttgcagtgcatactttactttccttaaactcaacgctggtcaaattcctttagatgaggatgaccctaggctgcatttaagtcacagagtggaacagagcactgatgacatgattgtgatggccacattgcgcctgctgcggttgctcgtgaagcacgctggtgagcttcggcagtatctggagcacggcttggagacaacacccactgcaccatggagaggaattattccgcaacttttctcacgcttaaaccaccctgaagtgtatgtgcgccaaagtatttgtaaccttctctgccgtgtggctcaagattccccacatctcatattgtatcctgcaatagtgggtaccatatcgcttagtagtgaatcccaggcttcaggaaataaattttccactgcaattccaactttacttggcaatattcaaggagaagaattgctggtttctgaatgtgagggaggaagtcctcctgcatctcaggatagcaataaggatgaacctaaaagtggattaaatgaagaccaagccatgatgcaggattgttacagcaaaattgtagataagctgtcctctgcaaaccccaccatggtattacaggttcagatgctcgtggctgaactgcgcagggtcactgtgctctgggatgagctctggctgggagttttgctgcaacaacacatgtatgtcctgagacgaattcagcagcttgaagatgaggtgaagagagtccagaacaacaacaccttacgcaaagaagagaaaattgcaatcatgagggagaagcacacagctttgatgaagcccatcgtatttgctttggagcatgtgaggagtatcacagcggctcctgcagaaacacctcatgaaaaatggtttcaggataactatggtgatgccattgaaaatgccctagaaaaactgaagactccattgaaccctgcaaagcctgggagcagctggattccatttaaagagataatgctaagtttgcaacagagagcacagaaacgtgcaagttacatcttgcgtcttgaagaaatcagtccatggttggctgccatgactaacactgaaattgctcttcctggggaagtctcagccagagacactgtcacaatccatagtgtgggcggaaccatcacaatcttaccgactaaaaccaagccaaagaaacttctctttcttggatcagatgggaagagctatccttatcttttcaaaggactggaggatttacatctggatgagagaataatgcagttcctatctattgtgaataccatgtttgctacaattaatcgccaagaaacaccccggttccatgctcgacactattctgtaacaccactaggaacaagatcaggactaatccagtgggtagatggagccacacccttatttggtctttacaaacgatggcaacaacgggaagctgccttacaagcacaaaaggcccaagattcctaccaaactcctcagaatcctggaattgtaccccgtcctagtgaactttattacagtaaaattggccctgctttgaaaacagttgggcttagcctggatgtgtcccgtcgggattggcctcttcatgtaatgaaggcagtattggaagagttaatggaggccacacccccgaatctccttgccaaagagctctggtcatcttgcacaacacctgatgaatggtggagagttacgcagtcttatgcaagatctactgcagtcatgtctatggttggatacataattggccttggagacagacatctggataatgttcttatagatatgacgactggagaagttgttcacatagattacaatgtttgctttgaaaaaggtaaaagccttagagttcctgagaaagtaccttttcgaatgacacaaaacattgaaacagcactgggtgtaactggagtagaaggtgtatttaggctttcatgtgagcaggttttacacattatgcggcgtggcagagagaccctgctgacgctgctggaggcctttgtgtacgaccctctggtggactggacagcaggaggcgaggctgggtttgctggtgctgtctatggtggaggtggccagcaggccgagagcaagcagagcaagagagagatggagcgagagatcacccgcagcctgttttcttctagagtagctgagattaaggtgaactggtttaagaatagagatgagatgctggttgtgcttcccaagttggacggtagcttagatgaatacctaagcttgcaagagcaactgacagatgtggaaaaactgcagggcaaactactggaggaaatagagtttctagaaggagctgaaggggtggatcatccttctcatactctgcaacacaggtattctgagcacacccaactacagactcagcaaagagctgttcaggaagcaatccaggtgaagctgaatgaatttgaacaatggataacacattatcaggctgcattcaataatttagaagcaacacagcttgcaagcttgcttcaagagataagcacacaaatggaccttggtcctccaagttacgtgccagcaacagcctttctgcagaatgctggtcaggcccacttgattagccagtgcgagcagctggagggggaggttggtgctctcctgcagcagaggcgctccgtgctccgtggctgtctggagcaactgcatcactatgcaaccgtggccctgcagtatccgaaggccatatttcagaaacatcgaattgaacagtggaagacctggatggaagagctcatctgtaacaccacagtagagcgttgtcaagagctctataggaaatatgaaatgcaatatgctccccagccacccccaacagtgtgtcagttcatcactgccactgaaatgaccctgcagcgatacgcagcagacatcaacagcagacttattagacaagtggaacgcttgaaacaggaagctgtcactgtgccagtttgtgaagatcagttgaaagaaattgaacgttgcattaaagttttccttcatgagaatggagaagaaggatctttgagtctagcaagtgttattatttctgccctttgtacccttacaaggcgtaacctgatgatggaaggtgcagcgtcaagtgctggagaacagctggttgatctgacttctcgggatggagcctggttcttggaggaactctgcagtatgagcggaaacgtcacctgcttggttcagttactgaagcagtgccacctggtgccacaggacttagatatcccgaaccccatggaagcgtctgagacagttcacttagccaatggagtgtatacctcacttcaggaattgaattcgaatttccggcaaatcatatttccagaagcacttcgatgtttaatgaaaggggaatacacgttagaaagtatgctgcatgaactggacggtcttattgagcagaccaccgatggcgttcccctgcagactctagtggaatctcttcaggcctacttaagaaacgcagctatgggactggaagaagaaacacatgctcattacatcgatgttgccagactactacatgctcagtacggtgaattaatccaaccgagaaatggttcagttgatgaaacacccaaaatgtcagctggccagatgcttttggtagcattcgatggcatgtttgctcaagttgaaactgctttcagcttattagttgaaaagttgaacaagatggaaattcccatagcttggcgaaagattgacatcataagggaagccaggagtactcaagttaatttttttgatgatgataatcaccggcaggtgctagaagagattttctttctaaaaagactacagactattaaggagttcttcaggctctgtggtaccttttctaaaacattgtcaggatcaagttcacttgaagatcagaatactgtgaatgggcctgtacagattgtcaatgtgaaaaccctttttagaaactcttgtttcagtgaagaccaaatggccaaacctatcaaggcattcacagctgactttgtgaggcagctcttgatagggctacccaaccaagccctcggactcacactgtgcagttttatcagtgctctgggtgtagacatcattgctcaagtagaggcaaaggactttggtgccgaaagcaaagtttctgttgatgatctctgtaagaaagcggtggaacataacatccagatagggaagttctctcagctggttatgaacagggcaactgtgttagcaagttcttacgacactgcctggaagaagcatgacttggtgcgaaggctagaaaccagtatttcttcttgtaagacaagcctgcagcgggttcagctgcatattgccatgtttcagtggcaacatgaagatctacttatcaatagaccacaagccatgtcagtcacacctcccccacggtctgctatcctaaccagcatgaaaaagaagctgcataccctgagccagattgaaacttctattgcaacagttcaggagaagctagctgcacttgaatcaagtattgaacagcgactcaagtgggcaggtggtgccaaccctgcattggcccctgtactacaagattttgaagcaacgatagctgaaagaagaaatcttgtccttaaagagagccaaagagcaagtcaggtcacatttctctgcagcaatatcattcattttgaaagtttacgaacaagaactgcagaagccttaaacctggatgcggcgttatttgaactaatcaagcgatgtcagcagatgtgttcgtttgcatcacagtttaacagttcagtgtctgagttagagcttcgtttattacagagagtggacactggtcttgaacatcctattggcagctctgaatggcttttgtcagcacacaaacagttgacccaggatatgtctactcagagggcaattcagacagagaaagagcagcagatagaaacggtctgtgaaacaattcagaatctggttgataatataaagactgtgctcactggtcataaccgacagcttggagatgtcaaacatctcttgaaagctatggctaaggatgaagaagctgctctggcagatggtgaagatgttccctatgagaacagtgttaggcagtttttgggtgaatataaatcatggcaagacaacattcaaacagttctatttacattagtccaggctatgggtcaggttcgaagtcaagaacacgttgaaatgctccaggaaatcactcccaccttgaaagaactgaaaacacaaagtcagagtatctataataatttagtgagttttgcatcacccttagtcaccgatgcaacaaatgaatgttcgagtccaacgtcatctgctacttatcagccatccttcgctgcagcagtccggagtaacactggccagaagactcagcctgatgtcatgtcacagaatgctagaaagctgatccagaaaaatcttgctacatcagctgatactccaccaagcaccgttccaggaactggcaagagtgttgcttgtagtcctaaaaaggcagtcagagaccctaaaactgggaaagcggtgcaagagagaaactcctatgcagtgagtgtgtggaagagagtgaaagccaagttagagggccgagatgttgatccgaataggaggatgtcagttgctgaacaggttgactatgtcattaaggaagcaactaatctagataacttggctcagctgtatgaaggttggacagcctgggtgtgaatggcaagacagtagatgagtctggttaagcgaggtcagacatccaccagaatcaactcagcctcaggcatccaaagccacaccacagtcggtggtgatgcaactgggggcttactctgaggaaacctaggaaatctcggtgcactaggaagtgaatcccgcaggacagctgcactcagggatacgcccaacaccatggcctgcaaccccagggtcaagggtgaaggaaagcaagctcaccgcctgaacacggagattgtctttctgccacagaacagcagcagacgtgtcgggaggttagctgcggaaagaaatcgggatgccgcggagcacagagtgatttggaactccattccacctgaccctgtgtgtacaatccaggaaaaaaacaaaccccactcagaaacagagaaaactggggtcgcgaagaaatcacagccaaggaagatttgatgcattcagattctcgtgtaacacttgttgcttggcaacagtactggttgggttgaccagtaagtagaaaaaggctaaaggctatgcgatatgaatttcagaaatggactgaaaatggagagctatgtaacagatacactacagtagaagaacttacttctgaaatgaagggaaaaaaaccaccccatcgttccctactcctccccaccacttacccgttccccctttacctaatctagtagattagccatctttcaaattcacttttatttcagtccttatatttcatatacttccgtctcgatgctgttaacaacttctgataacatggaaaattcaaggattgtttaaaggtctgatgatcacacacaaaatgtaattccggttatttaagtcatttctgtgattctatcatgtacagtttccagaattgtcactgtgcattcaaaagtaatgaatctaacagacatttgatttaatgtacactcccttttgcttatagtgtgcattttttttggaggtcattcaaattttccctcttctgtgatagctgtagtttctttcatagaaagtagctaatccagtgtaatcttttacctttttaaaaaccaagatagagtatctattagagttttacattgttgatgatagattaacaataaagtgatgttctggtggaggtagactgaaatttttttaattcatgtttttcatttgatacttttaatttacacttagtaaattaaaagttgtttaatttacttggcattttaggacatgtacatgaaacagtgaaaatgagatccaccaacatcttttattaagttcagttattagtctgtgaagtgctttactttttgcacaattttaatagcttgctattcagtaatacattatagtgaattcatgatcaaggtttccttaaatttagcattgcatttcagtactgactgtgtaagctaaattgctgatccaaaataaaaacccagactagaatagggttcttaaaatcaagtatcaatacaaaatagaacacaattaaaatcttaattgttggctgggcacagtggctcacgcctgtaatcccagcactttgggaggccgaggcgggcggatcatgaggttaggagagcgagaccatcctggctaacacggtgaaaccccgtctttactaaaaatacaaaaaaaattagccgggcgtggtggcgggcgcctgtagtcccagctactcgggaggctgaggcaggagaatggcgtgaacccaggaggcggagcttgcagtgagccgagattgtgccactgcactccagcctgggcaacagagctagactctgtgtcaaaaataaatgactagataaaaaaaaaaattgtttgagtacattttccctgcattttagagattaggacagtggtcactttctagttgccgtcttcacagacaaacttgaaaggtattaaggaaaaaattccacatagctctgggccttttttgtattctgattgccacgttaatctgtaatcgttaagtacccatgaaagaatgtgtttcagtatcagtgcttttttggtactttaacaagtattgtaggcacggtggatttttttgaaatacccatgtgtccaatagcaagttaaggaacctagcgcatcaaattttgttttcttcattcatttggaaccttattttcgcaaaaaacctagctggaataataatgccatattgtattttgcacactgctttattttctagaggctctgggagcaaattacattcatcacattacctctgctctctcaagattaaagtctttcagcaacattctttattgtcatcataaggaaaaacttttatcgcaatgatagtcagttcacattagtttagcactatagatagtattcagaaattgctttctctttggtaaagaagataaataggtgaattttattgcctgtgttttcaggcttcagaggtacctggcaccttactcaagcaaaaacaaaaaacagctttacttcaaaagcatgtgcctctggtaaattatccatcacttttgttttaaagtggtccctccaagaataatgtggcatacacagtgggtttggttgtaaggcagatgtaatagatgacttcaaaagcctgctccttactgcactctggacaaggccctggtctgtatagtttggcttcctctgttaagtcattctacaaggtgacttgccatttgaactttcgtaagagacctcagcagttagactgagaaaagttagagtgctgtagttatgaagtcatacatttttgataaaatacctgtggaaaaccagggatcctctcctgtttctctctcttgcctccccctttccctccattcctctgtcgcctccccctctcctccactttctttaagaatcagggggtacagaataacctacaaacaacctcttcaaagtacccttggaaattgaagttcaatcttaagttttttgctgtctttaatttactagaattgcctaatttttagttgatttctctacagagcttagcttgtgtagttatttctcttttactgttgctttggtgtgtcttgaagtttgattgattatttttggtcattgagttcttagtgtagtttgctagatgattattaagattcttttgtgtctgacacttgtggtgagttgcttttgaaatctgttgagatttccatgtgagaactgataatcaggctcttgatctgcttccctaaattacttttttagagcccaaaccccaggtttagggtgagggtttgtaatacaaagaaacacttccatcacttctgcccttaacccttgcctctattacctaagcttagtaagtagttttcttaatattgtccaatgtttggtgttatctgcattgttttttgtttttttaattgtggttgttctgacgtgtgaaatttaaggaaagagccattttttaaaaatgccgagcagggcaatgcaagtacagccaaatattagacttgatgtgcaatcttcggtcctttttaatctggggtattataggcagtactttaaattgcaaagtcttccgggcctattttcctctacatttttgtaattaactctgggggcttacttgttttggcagtactgaaatcaaaggagctggttcttcttttctcccaattattttcatatgaaagcacctacaattagcctgttagtcctattcagatacatcaaatatcagtgaatgctttactattcgcacatttaagcatctttgttttacataaaattagagtatgaaaaccagtgttcaattttttatcttgttgagcttgtaaaatgccagcaatttaaaactaggacttttccccccataagccaaggaggtagaattactaatacaagggttaaagaaggtagattttgttttcaatatttgggtaatattagaaagattcttcccacagggaagaactagcaagtgtcccaattttttccaaacgttggggaggggaaaattcactgtatcatgaaaccctaagggtttgttgcacttcctgctttttaggcctggataacagtatcaccatccttatttacagaagggtaaaactgactcttaatgagaaaagctttataagttcaagggctgtaaaatatgaactacttagggtcgtttgccttccatgggaacttggctagacttagaaaaagctgtttgttgtgctaatgtaaaagtgtcatacaatttagaagatttttgaagatggtaaacttagaagaattctatgttctgaaatgcacacttttagaatgtttttctttgaaaacaggctaatagttttttctttttttgacaaagtttcagctcctctttaaagttattgtgtcatttttctggtttaaatttcccttatatttccacctgtaatgtcagtggcaacaacatcatacttcacttacttgttaatttactttttacccttattctaagagcaagttgagttgaactgaatcttccttgtcttagtaacaatgtataaatagtggcttttctgtacaaaaggttgtaatgcctcctgatggatataattttgtgattgtatttaaaagttgaataaatcacaccagcttcctgaaaatgttcataatgcatcttttggaaaacaaatacatgcctacttt

SEQ ID NO: 189 - protein, 3635 aa, Homo sapiens
MSRRAPGSRLSSGGGGGGTKYPRSWNDWQPRTDSASADPDNLKYSSSRDRGGSSSYGLQPSNSAVVSRQRHDDTRVHADIQNDEKGGYSVNGGSGENTYGRKSLGQELRVNNVTSPEFTSVQHGSRATKDMRKSQERSMSYSDESRLSNLLRRITREDDRDRRLATVKQLKEFIQQPENKLVLVKQLDNILAAVHDVLNESSKLLQELRQEGACCLGLLCASLSYEAEKIFKWIFSKFSSSAKDEVKLLYLCATYKALETVGEKKAFSSVMQLVMTSLQSINVDTPELLCKCVKCILLVARCYPHIFSTNFRDTVDILVGWHIDHTQKPSLTQQVSGWLQSLEPFWVADLAFSTTLLGQFLEDMEAYAEDLSHVASGESVDEDVPPPSVSLPKLAALLRVFSTVVRSIGERFSPIRGPPITEAYVTDVLYRVMRCVTAANQVFFSEAVLTAANECVGVLLGSLDPSMTIHCDMVITYGLDQLENCQTCGTDYIISVLNLLTLIVEQINTKLPSSFVEKLFIPSSKLLFLRYHKEKEVVAVAHAVYQAVLSLKNIPVLETAYKLILGEMTCALNNLLHSLQLPEACSEIKHEAFKNHVFNVDNAKFVVIFDLSALTTIGNAKNSLIGMWALSPTVFALLSKNLMIVHSDLAVHFPAIQYAVLYTKHCTRHDHFISSSLSSSSPSLFDGAVISTVTTATKKHFSIILNLLGILLKKDNLNQDTRKLLMTWALEAAVLMKKSETYAPLFSLPSFHKFCKGLLANTLVEDVNICLQACSSLHALSSSLPDDLLQRCVDVCRVQLVHSGTRIRQAFGKLLKSIPLDVVLSNNNHTEIQEISLALRSHMSKAPSNTFHPQDFSDVISFILYGNSHRTGKDNWLERLFYSCQRLDKRDQSTIPRNLLKTDAVLWQWAIWEAAQFTVLSKLRTPLGRAQDTFQTIEGIIRSLAAHTLNPDQDVSQWTTADNDEGHGNNQLRLVLLLQYLENLEKLMYNAYEGCANALTSPPKVIRTFFYTNRQTCQDWLTRIRLSIMRVGLLAGQPAVTVRHGFDLLTEMKTTSLSQGNELEVTIMMVVEALCELHCPEAIQGIAVWSSSIVGKNLLWINSVAQQAEGRFEKASVEYQEHLCAMTGVDCCISSFDKSVLTLANAGRNSDKHSLNGESRKTVLSKPTDSSPEVINYLGNKACECYISIADWAAVQEWQNAIHDLKKSTSSTSLNLKADFNYIKSLSSFESGKFVECTEQLELLPGENINLLAGGSKEKIDMKKLLPNMLSPDPRELQKSIEVQLLRSSVCLATALNPIEQDQKWQSITENVVKYLKQTSRIAIGPLRLSTLTVSQSLPVLSTLQLYCSSALENTVSNRLSTEDCLIPLFSEALRSCKQHDVRPWMQALRYTMYQNQLLEKIKEQTVPIRSHLMELGLTAAKFARKRGNVSLATRLLAQCSEVQLGKTTTAQDLVQHFKKLSTQGQVDEKWGPELDIEKTKLLYTAGQSTHAMEMLSSCAISFCKSVKAEYAVAKSILTLAKWIQAEWKEISGQLKQVYRAQHQQNFTGLSTLSKNILTLIELPSVNTMEEEYPRIESESTVHIGVGEPDFILGQLYHLSSVQAPEVAKSWAASWAYRWGRKVVDNASQGEGVRLLPREKSEVQNLLPDTITEEEKERIYGILGQAVCRPAGIQDEDITLQITESEDNEEDDMVDVIWRQLISSCPWLSELDESATEGVIKVWRKVVDRIFSLYKLSCSAYFTFLKLNAGQIPLDEDDPRLHLSHRVEQSTDDMIVMATLRLLRLLVKHAGELRQYLEHGLETTPTAPWRGIIPQLFSRLNHPEVYVRQSICNLLCRVAQDSPHLILYPAIVGTISLSSESQASGNKFSTAIPTLLGNIQGEELLVSECEGGSPPASQDSNKDEPKSQEDQAMMQDCKIVDKLSSANPTMVLQVQMLVAELRRVTVLWDELWLGVLLQQHMYVLRRIQQLEDEVKRVQNNNTLRKEEKIAIMREKHTALMKPIVFALEHVRSITAAPAETFKWFQDNYGDAIENALEKLKTPLNPAKPGSSWIPFKEIMLSLQQRAQKRASYILRLEEISPWLAAMTNTEIALPGEVSARDTVTIHSVGGTITILPTKTKPKKLLFLGSDGKSYPYLFKGLEDLHLDERIMQFLSIVNTMFATINRQETPRFHARHYSVTPLGTRSGLIQWVDGATPLFGKRWQQREAALQAQKAQDSYQTPQNPGIVPRPSELYYSKIGPALKTVGLSLDVSRRDWPLHVMKAVLEELMEATPPNLLAKELWSSCTTPDEWWRVTQSYARSTAVMSMVGYIIGLGDRHLDNVLIDMTTGEVVHIDYNVCFEKGKSLRVPEKVPFRMTQNIETALGVTGVEGVFRLSCEQVLHIMRRGRETLLTLLEAFVYDPLVDWTAGGEAGFAGAVYGGGGQQAESKQSKREMEREITRSLFSSRVAEIKVNWFKNRDEMLVVLPKLDGSLDEYLSLQEQLTDVEKLQGKLLEEIEFLEGAEGVDHPSHTLQHRYSEHTQLQTQQRAVQEAIQVKLNEFEQWITHYQAAFNNLEATQLASLLQEISTQMDLGPPSYVPATAFLQNAGQAHLISQCEQLEGEVGALLQQRRSVLRGCLEQLHHYATVQYPKAIFQKHRIEQWKTWMEELICNTTVERCQELYRKYEMQYAPQPPPTVCQFITATEMTLQRYAADINSRLIRQVERLKQEAVTVPVCEDQLKEIERCIKVFLHENGEEGSLSLASVIISALCTLTRRNLMMEGAASSAGEQLVDLTSRDGAWFLEELCSMSGNVTCLVQLLKQCHLVPQDLDIPNPMEASETVHLANGVYTSLQELNSNFRQIIFPEALRCLMKGEYTLESMLHELDGLIEQTTDGVPLQTLVESLQAYLRNAAMGLEEETHAHYIDVARLLHAQYGELIQPRNGSVDETPKMSAGQMLLVAFDGMFAQVETAFSLLVEKLNKMEIPIAWRKIDIIREARSTQVNFFDDDNHRQVLEEIFFLKRLQTIKEFFRLCGTFSKTLSGSSSLEDQNTVNGPVQIVNVKTLFRNSCFSEDQMAKPIKAFTADFVRQLLIGLPNQALGLTLCSFISALGVDIIAQVEAKDFGAESKVSVDDLCKKAVEHNIQIGKFSQLVMNRATVLASSYDTAWKKHDLVRRLETSISSCKTSLQRVQLHIAMFQWQHEDLLINRPQAMSVTPPPRSAILTSMKKKLHTLSQIETSIATVQEKLAALESSIEQRLKWAGGANPAPVLQDFEATIAERRNLVLKESQRASQVTFLCSNIIHFESLRTRTAEALNLDAALFELIKRCQQMCSFASQFNSSVSELELRLLQRVDTGLEHPIGSSEWLLSAHKQLTQDMSTQRAIQTEKEQQIETVCETIQNLVDNIKTVLTGHNRQLGDVKHLLKAMAKDEEAADGEDVPYENSVRQFLGEYKSWQDNIQTVLFTLVQAMGQVRSQEHVEMLQEITPTLKELKTQSQSIYNNLVSFDLVTDATNECSSPTSSATYQPSFAAAVRSNTGQKTQPDVMSQNARKLIQKNLATSADTPPSTVPGTGKSVACSPKKAVRDPKTGKAVQERNSYAVSVWKRVKAKLEGRDVDPNRRMSVAEQVDYVIKEATNLDNLAQLYEGWTAWV

SEQ ID NO: 190 - DNA, 13795 bp, Homo sapiens
catgaggcttttaagaatcatgtgttcaatgtagacaatgcaaaatttgtagttatatttgacctcaatgtgggcgctatctccaactgtctttgcacttctgagtaagaatctgatgattgtgcacagtgacctggctgttcacttccctgccattcagtatgctgtgctctacacattgtattctcattgtaccaggcatgatcactttatctctagtagcctcagttcttcctctccttctttgtttgatggagctgtgattagcactgtaactacggctacaaagaaacatttctcaattatattaaatcttctgggaatattacttaagaaagataaccttaaccaggacacgaggaaactgttaatgacttgggctttggaagcagctgttttaatgaagaagtctgaaacatacgcacctttattctctcttccgtctttccataaattttgcaaaggccttttagccaacactctcgttgaagatgtgaatatctgtctgcaggcatgcagcagtctacatgctctgtcctcttccttgccagatgatcttttacagagatgtgtcgatgtttgccgtgttcaactagtgcacagtggaactcgtattcgacaagcatttggaaaactgttgaaatcaattcctttagatgttgtcctaagcaataacaatcacacagaaattcaagaaatttctttagcattaagaagtcacatgagtaaagcaccaagtaatacattccacccccaagatttctctgatgttattagttttattttgtatgggaactctcatagaacagggaaggacaattggttggaaagactgttctatagctgccagagactggataagcgtgaccagtcaacaattccacgcaatctcctgaagacagatgctgtcctttggcagtgggccatatgggaagctgcacaattcactgttctttctaagctgagaaccccactgggcagagctcaagacaccttccagacaattgaaggtatcattcgaagtctcgcagctcacacattaaaccctgatcaggatgttagtcagtggacaactgcagacaatgatgaaggccatggtaacaaccaacttagacttgttcttcttctgcagtatctggaaaatctggagaaattaatgtataatgcatacgagggatgtgctaatgcattaacttcacctcccaaggtcattagaacttttttctataccaatcgccaaacttgtcaggactggctaacgcggattcgactctccatcatgagggtaggattgttggcaggccagcctgcagtgacagtgagacatggctttgacttgcttacagagatgaaaacaaccagcctatctcaggggaatgaattggaagtaaccattatgatggtggtagaagcattatgtgaacttcattgtcctgaagctatacagggaattgctgtctggtcatcatctattgttggaaaaaatcttctgtggattaactcagtggctcaacaggctgaagggaggtttgaaaaggcctctgtggagtaccaggaacacctgtgtgccatgacaggtgttgattgctgcatctccagctttgacaaatcggtgctcaccttagccaatgctgggcgtaacagtgccagcccgaaacattctctgaatggtgaatccagaaaaactgtgctgtccaaaccgactgactcttcccctgaggttataaattatttaggaaataaagcatgtgagtgctacatctcaattgccgattgggctgctgtgcaggaatggcagaacgctatccatgacttgaaaaagagtaccagtagcacttccctcaacctgaaagctgacttcaactatataaaatcattaagcagctttgagtctggaaaatttgttgaatgtaccgagcagttagaattgttaccaggagaaaatatcaatctacttgctggaggatcaaaagaaaaaatagacatgaaaaaactgcttcctaacatgttaagtccggatccgagggaacttcagaaatccattgaagttcaattgttaagaagttctgtttgtttggcaactgctttaaacccgatagaacaagatcagaagtggcagtctataactgaaaatgtggtaaagtacttgaagcaaacatcccgcatcgctattggacctctgagactttctactttaacagtttcacagtctttgccagttctaagtaccttgcagctgtattgctcatctgctttggagaacacagtttctaacagactttcaacagaggactgtcttattccactcttcagtgaagctttacgttcatgtaaacagcatgacgtgaggccatggatgcaggcattaaggtatactatgtaccagaatcagttgttggagaaaattaaagaacaaacagtcccaattagaagccatctcatggaattaggtctaacagcagcaaaatttgctagaaaacgagggaatgtgtcccttgcaacaagactgctggcacagtgcagtgaagttcagctgggaaagaccaccactgcacaggatttagtccaacattttaaaaaactatcaacccaaggtcaagtggatgaaaaatgggggcccgaacttgatattgaaaaaaccaaattgctttatacagcaggccagtcaacacatgcaatggaaatgttgagttcttgtgccatatctttctgcaagtctgtgaaagctgaatatgcagttgctaaatcaattctgacactggctaaatggatccaggcagaatggaaagagatttcaggacagctgaaacaggtttacagagctcagcaccaacagaacttcacaggtctttctactttgtctaaaaacatactcactctaatagaactgccatctgttaatacgatggaagaagagtatcctcggatcgagagtgaatctacagtgcatattggagttggagaacctgacttcattttgggacagttgtatcacctgtcttcagtacaggcacctgaagtagccaaatcttgggcagcgttggccagctgggcttataggtggggcagaaaggtggttgacaatgccagtcagggagaaggtgttcgtctgctgcctagagaaaaatctgaagttcagaatctacttccagacactataactgaggaagagaaagagagaatatatggtattcttggacaggctgtgtgtcggccggcggggattcaggatgaagatataacacttcagataactgagagtgaagacaacgaagaagatgacatggttgatgttatctggcgtcagttgatatcaagctgcccatggctttcagaacttgatgaaagtgcaactgaaggagttattaaagtgtggaggaaagttgtagatagaatattcagcctgtacaaactctcttgcagtgcatactttactttccttaaactcaacgctggtcaaattcctttagatgaggatgaccctaggctgcatttaagtcacagagtggaacagagcactgatgacatgattgtgatggccacattgcgcctgctgcggttgctcgtgaagcacgctggtgagcttcggcagtatctggagcacggcttggagacaacacccactgcaccatggagaggaattattccgcaacttttctcacgcttaaaccaccctgaagtgtatgtgcgccaaagtatttgtaaccttctctgccgtgtggctcaagattccccacatctcatattgtatcctgcaatagtgggtaccatatcgcttagtagtgaatcccaggcttcaggaaataaattttccactgcaattccaactttacttggcaatattcaaggagaagaattgctggtttctgaatgtgagggaggaagtcctcctgcatctcaggatagcaataaggatgaacctaaaagtggattaaatgaagaccaagccatgatgcaggattgttacagcaaaattgtagataagctgtcctctgcaaaccccaccatggtattacaggttcagatgctcgtggctgaactgcgcagggtcactgtgctctgggatgagctctggctgggagttttgctgcaacaacacatgtatgtcctgagacgaattcagcagcttgaagatgaggtgaagagagtccagaacaacaacaccttacgcaaagaagagaaaattgcaatcatgagggagaagcacacagctttgatgaagcccatcgtatttgctttggagcatgtgaggagtatcacagcggctcctgcagaaacacctcatgaaaaatggtttcaggataactatggtgatgccattgaaaatgccctagaaaaactgaagactccattgaaccctgcaaagcctgggagcagctggattccatttaaagagataatgctaagtttgcaacagagagcacagaaacgtgcaagttacatcttgcgtcttgaagaaatcagtccatggttggctgccatgactaacactgaaattgctcttcctggggaagtctcagccagagacactgtcacaatccatagtgtgggcggaaccatcacaatcttaccgactaaaaccaagccaaagaaacttctctttcttggatcagatgggaagagctatccttatcttttcaaaggactggaggatttacatctggatgagagaataatgcagttcctatctattgtgaataccatgtttgctacaattaatcgccaagaaacaccccggttccatgctcgacactattctgtaacaccactaggaacaagatcaggactaatccagtgggtagatggagccacacccttatttggtctttacaaacgatggcaacaacgggaagctgccttacaagcacaaaaggcccaagattcctaccaaactcctcagaatcctggaattgtaccccgtcctagtgaactttattacagtaaaattggccctgctttgaaaacagttgggcttagcctggatgtgtcccgtcgggattggcctcttcatgtaatgaaggcagtattggaagagttaatggaggccacacccccgaatctccttgccaaagagctctggtcatcttgcacaacacctgatgaatggtggagagttacgcagtcttatgcaagatctactgcagtcatgtctatggttggatacataattggccttggagacagacatctggataatgttcttatagatatgacgactggagaagttgttcacatagattacaatgtttgctttgaaaaaggtaaaagccttagagttcctgagaaagtaccttttcgaatgacacaaaacattgaaacagcactgggtgtaactggagtagaaggtgtatttaggctttcatgtgagcaggttttacacattatgcggcgtggcagagagaccctgctgacgctgctggaggcctttgtgtacgaccctctggtggactggacagcaggaggcgaggctgggtttgctggtgctgtctatggtggaggtggccagcaggccgagagcaagcagagcaagagagagatggagcgagagatcacccgcagcctgttttcttctagagtagctgagattaaggtgaactggtttaagaatagagatgagatgctggttgtgcttcccaagttggacggtagcttagatgaatacctaagcttgcaagagcaactgacagatgtggaaaaactgcagggcaaactactggaggaaatagagtttctagaaggagctgaaggggtggatcatccttctcatactctgcaacacaggtattctgagcacacccaactacagactcagcaaagagctgttcaggaagcaatccaggtgaagctgaatgaatttgaacaatggataacacattatcaggctgcattcaataatttagaagcaacacagcttgcaagcttgcttcaagagataagcacacaaatggaccttggtcctccaagttacgtgccagcaacagcctttctgcagaatgctggtcaggcccacttgattagccagtgcgagcagctggagggggaggttggtgctctcctgcagcagaggcgctccgtgctccgtggctgtctggagcaactgcatcactatgcaaccgtggccctgcagtatccgaaggccatatttcagaaacatcgaattgaacagtggaagacctggatggaagagctcatctgtaacaccacagtagagcgttgtcaagagctctataggaaatatgaaatgcaatatgctccccagccacccccaacagtgtgtcagttcatcactgccactgaaatgaccctgcagcgatacgcagcagacatcaacagcagacttattagacaagtggaacgcttgaaacaggaagctgtcactgtgccagtttgtgaagatcagttgaaagaaattgaacgttgcattaaagttttccttcatgagaatggagaagaaggatctttgagtctagcaagtgttattatttctgccctttgtacccttacaaggcgtaacctgatgatggaaggtgcagcgtcaagtgctggagaacagctggttgatctgacttctcgggatggagcctggttcttggaggaactctgcagtatgagcggaaacgtcacctgcttggttcagttactgaagcagtgccacctggtgccacaggacttagatatcccgaaccccatggaagcgtctgagacagttcacttagccaatggagtgtatacctcacttcaggaattgaattcgaatttccggcaaatcatatttccagaagcacttcgatgtttaatgaaaggggaatacacgttagaaagtatgctgcatgaactggacggtcttattgagcagaccaccgatggcgttcccctgcagactctagtggaatctcttcaggcctacttaagaaacgcagctatgggactggaagaagaaacacatgctcattacatcgatgttgccagactactacatgctcagtacggtgaattaatccaaccgagaaatggttcagttgatgaaacacccaaaatgtcagctggccagatgcttttggtagcattcgatggcatgtttgctcaagttgaaactgctttcagcttattagttgaaaagttgaacaagatggaaattcccatagcttggcgaaagattgacatcataagggaagccaggagtactcaagttaatttttttgatgatgataatcaccggcaggtgctagaagagattttctttctaaaaagactacagactattaaggagttcttcaggctctgtggtaccttttctaaaacattgtcaggatcaagttcacttgaagatcagaatactgtgaatgggcctgtacagattgtcaatgtgaaaaccctttttagaaactcttgtttcagtgaagaccaaatggccaaacctatcaaggcattcacagctgactttgtgaggcagctcttgatagggctacccaaccaagccctcggactcacactgtgcagttttatcagtgctctgggtgtagacatcattgctcaagtagaggcaaaggactttggtgccgaaagcaaagtttctgttgatgatctctgtaagaaagcggtggaacataacatccagatagggaagttctctcagctggttatgaacagggcaactgtgttagcaagttcttacgacactgcctggaagaagcatgacttggtgcgaaggctagaaaccagtatttcttcttgtaagacaagcctgcagcgggttcagctgcatattgccatgtttcagtggcaacatgaagatctacttatcaatagaccacaagccatgtcagtcacacctcccccacggtctgctatcctaaccagcatgaaaaagaagctgcataccctgagccagattgaaacttctattgcaacagttcaggagaagctagctgcacttgaatcaagtattgaacagcgactcaagtgggcaggtggtgccaaccctgcattggcccctgtactacaagattttgaagcaacgatagctgaaagaagaaatcttgtccttaaagagagccaaagagcaagtcaggtcacatttctctgcagcaatatcattcattttgaaagtttacgaacaagaactgcagaagccttaaacctggatgcggcgttatttgaactaatcaagcgatgtcagcagatgtgttcgtttgcatcacagtttaacagttcagtgtctgagttagagcttcgtttattacagagagtggacactggtcttgaacatcctattggcagctctgaatggcttttgtcagcacacaaacagttgacccaggatatgtctactcagagggcaattcagacagagaaagagcagcagatagaaacggtctgtgaaacaattcagaatctggttgataatataaagactgtgctcactggtcataaccgacagcttggagatgtcaaacatctcttgaaagctatggctaaggatgaagaagctgctctggcagatggtgaagatgttccctatgagaacagtgttaggcagtttttgggtgaatataaatcatggcaagacaacattcaaacagttctatttacattagtccaggctatgggtcaggttcgaagtcaagaacacgttgaaatgctccaggaaatcactcccaccttgaaagaactgaaaacacaaagtcagagtatctataataatttagtgagttttgcatcacccttagtcaccgatgcaacaaatgaatgttcgagtccaacgtcatctgctacttatcagccatccttcgctgcagcagtccggagtaacactggccagaagactcagcctgatgtcatgtcacagaatgctagaaagctgatccagaaaaatcttgctacatcagctgatactccaccaagcaccgttccaggaactggcaagagtgttgcttgtagtcctaaaaaggcagtcagagaccctaaaactgggaaagcggtgcaagagagaaactcctatgcagtgagtgtgtggaagagagtgaaagccaagttagagggccgagatgttgatccgaataggaggatgtcagttgctgaacaggttgactatgtcattaaggaagcaactaatctagataacttggctcagctgtatgaaggttggacagcctgggtgtgaatggcaagacagtagatgagtctggttaagcgaggtcagacatccaccagaatcaactcagcctcaggcatccaaagccacaccacagtcggtggtgatgcaactgggggcttactctgaggaaacctaggaaatctcggtgcactaggaagtgaatcccgcaggacagctgcactcagggatacgcccaacaccatggcctgcaaccccagggtcaagggtgaaggaaagcaagctcaccgcctgaacacggagattgtctttctgccacagaacagcagcagacgtgtcgggaggttagctgcggaaagaaatcgggatgccgcggagcacagagtgatttggaactccattccacctgaccctgtgtgtacaatccaggaaaaaaacaaaccccactcagaaacagagaaaactggggtcgcgaagaaatcacagccaaggaagatttgatgcattcagattctcgtgtaacacttgttgcttggcaacagtactggttgggttgaccagtaagtagaaaaaggctaaaggctatgcgatatgaatttcagaaatggactgaaaatggagagctatgtaacagatacactacagtagaagaacttacttctgaaatgaagggaaaaaaaccaccccatcgttccctactcctccccaccacttacccgttccccctttacctaatctagtagattagccatctttcaaattcacttttatttcagtccttatatttcatatacttccgtctcgatgctgttaacaacttctgataacatggaaaattcaaggattgtttaaaggtctgatgatcacacacaaaatgtaattccggttatttaagtcatttctgtgattctatcatgtacagtttccagaattgtcactgtgcattcaaaagtaatgaatctaacagacatttgatttaatgtacactcccttttgcttatagtgtgcattttttttggaggtcattcaaattttccctcttctgtgatagctgtagtttctttcatagaaagtagctaatccagtgtaatcttttacctttttaaaaaccaagatagagtatctattagagttttacattgttgatgatagattaacaataaagtgatgttctggtggaggtagactgaaatttttttaattcatgtttttcatttgatacttttaatttacacttagtaaattaaaagttgtttaatttacttggcattttaggacatgtacatgaaacagtgaaaatgagatccaccaacatcttttattaagttcagttattagtctgtgaagtgctttactttttgcacaattttaatagcttgctattcagtaatacattatagtgaattcatgatcaaggtttccttaaatttagcattgcatttcagtactgactgtgtaagctaaattgctgatccaaaataaaaacccagactagaatagggttcttaaaatcaagtatcaatacaaaatagaacacaattaaaatcttaattgttggctgggcacagtggctcacgcctgtaatcccagcactttgggaggccgaggcgggcggatcatgaggttaggagagcgagaccatcctggctaacacggtgaaaccccgtctttactaaaaatacaaaaaaaattagccgggcgtggtggcgggcgcctgtagtcccagctactcgggaggctgaggcaggagaatggcgtgaacccaggaggcggagcttgcagtgagccgagattgtgccactgcactccagcctgggcaacagagctagactctgtgtcaaaaataaatgactagataaaaaaaaaaattgtttgagtacattttccctgcattttagagattaggacagtggtcactttctagttgccgtcttcacagacaaacttgaaaggtattaaggaaaaaattccacatagctctgggccttttttgtattctgattgccacgttaatctgtaatcgttaagtacccatgaaagaatgtgtttcagtatcagtgcttttttggtactttaacaagtattgtaggcacggtggatttttttgaaatacccatgtgtccaatagcaagttaaggaacctagcgcatcaaattttgttttcttcattcatttggaaccttattttcgcaaaaaacctagctggaataataatgccatattgtattttgcacactgctttattttctagaggctctgggagcaaattacattcatcacattacctctgctctctcaagattaaagtctttcagcaacattctttattgtcatcataaggaaaaacttttatcgcaatgatagtcagttcacattagtttagcactatagatagtattcagaaattgctttctctttggtaaagaagataaataggtgaattttattgcctgtgttttcaggcttcagaggtacctggcaccttactcaagcaaaaacaaaaaacagctttacttcaaaagcatgtgcctctggtaaattatccatcacttttgttttaaagtggtccctccaagaataatgtggcatacacagtgggtttggttgtaaggcagatgtaatagatgacttcaaaagcctgctccttactgcactctggacaaggccctggtctgtatagtttggcttcctctgttaagtcattctacaaggtgacttgccatttgaactttcgtaagagacctcagcagttagactgagaaaagttagagtgctgtagttatgaagtcatacatttttgataaaatacctgtggaaaaccagggatcctctcctgtttctctctcttgcctccccctttccctccattcctctgtcgcctccccctctcctccactttctttaagaatcagggggtacagaataacctacaaacaacctcttcaaagtacccttggaaattgaagttcaatcttaagttttttgctgtctttaatttactagaattgcctaatttttagttgatttctctacagagcttagcttgtgtagttatttctcttttactgttgctttggtgtgtcttgaagtttgattgattatttttggtcattgagttcttagtgtagtttgctagatgattattaagattcttttgtgtctgacacttgtggtgagttgcttttgaaatctgttgagatttccatgtgagaactgataatcaggctcttgatctgcttccctaaattacttttttagagcccaaaccccaggtttagggtgagggtttgtaatacaaagaaacacttccatcacttctgcccttaacccttgcctctattacctaagcttagtaagtagttttcttaatattgtccaatgtttggtgttatctgcattgttttttgtttttttaattgtggttgttctgacgtgtgaaatttaaggaaagagccattttttaaaaatgccgagcagggcaatgcaagtacagccaaatattagacttgatgtgcaatcttcggtcctttttaatctggggtattataggcagtactttaaattgcaaagtcttccgggcctattttcctctacatttttgtaattaactctgggggcttacttgttttggcagtactgaaatcaaaggagctggttcttcttttctcccaattattttcatatgaaagcacctacaattagcctgttagtcctattcagatacatcaaatatcagtgaatgctttactattcgcacatttaagcatctttgttttacataaaattagagtatgaaaaccagtgttcaattttttatcttgttgagcttgtaaaatgccagcaatttaaaactaggacttttccccccataagccaaggaggtagaattactaatacaagggttaaagaaggtagattttgttttcaatatttgggtaatattagaaagattcttcccacagggaagaactagcaagtgtcccaattttttccaaacgttggggaggggaaaattcactgtatcatgaaaccctaagggtttgttgcacttcctgctttttaggcctggataacagtatcaccatccttatttacagaagggtaaaactgactcttaatgagaaaagctttataagttcaagggctgtaaaatatgaactacttagggtcgtttgccttccatgggaacttggctagacttagaaaaagctgtttgttgtgctaatgtaaaagtgtcatacaatttagaagatttttgaagatggtaaacttagaagaattctatgttctgaaatgcacacttttagaatgtttttctttgaaaacaggctaatagttttttctttttttgacaaagtttcagctcctctttaaagttattgtgtcatttttctggtttaaatttcccttatatttccacctgtaatgtcagtggcaacaacatcatacttcacttacttgttaatttactttttacccttattctaagagcaagttgagttgaactgaatcttccttgtcttagtaacaatgtataaatagtggcttttctgtacaaaaggttgtaatgcctcctgatggatataattttgtgattgtatttaaaagttgaataaatcacaccagcttcctgaaaatgttcataatgcatcttttggaaaacaaatacatgcctacttt

SEQ ID NO: 191 - protein, 3009 aa, Homo sapiens
MWALSPTVFALLSKNLMIVHSDLAVHFPAIQYAVLYTKHCTRHDHFISSSLSSSSPSLFDGAVISTVTTATKKHFSIILNLLGILLKKDNLNQDTRKLLMTWALEAAVLMKKSETYAPLFSLPSFHKFCKGLLANTLVEDVNICLQACSSLHALSSSLPDDLLQRCVDVCRVQLVHSGTRIRQAFGKLLKSIPLDVVLSNNNHTEIQEISLALRSHMSKAPSNTFHPQDFSDVISFILYGNSHRTGKDNWLERLFYSCQRLDKRDQSTIPRNLLKTDAVLWQWAIWEAAQFTVLSKLRTPLGRAQDTFQTIEGIIRSLAAHTLNPDQDVSQWTTADNDEGHGNNQLRLVLLLQYLENLEKLMYNAYEGCANALTSPPKVIRTFFYTNRQTCQDWLTRIRLSIMRVGLLAGQPAVTVRHGFDLLTEMKTTSLSQGNELEVTIMMVVEALCELHCPEAIQGIAVWSSSIVGKNLLWINSVAQQAEGRFEKASVEYQEHLCAMTGVDCCISSFDKSVLTLANAGRNSDKHSLNGESRKTVLSKPTDSSPEVINYLGNKACECYISIADWAAVQEWQNAIHDLKKSTSSTSLNLKADFNYIKSLSSFESGKFVECTEQLELLPGENINLLAGGSKEKIDMKKLLPNMLSPDPRELQKSIEVQLLRSSVCLATALNPIEQDQKWQSITENVVKYLKQTSRIAIGPLRLSTLTVSQSLPVLSTLQLYCSSALENTVSNRLSTEDCLIPLFSEALRSCKQHDVRPWMQALRYTMYQNQLLEKIKEQTVPIRSHLMELGLTAAKFARKRGNVSLATRLLAQCSEVQLGKTTTAQDLVQHFKKLSTQGQVDEKWGPELDIEKTKLLYTAGQSTHAMEMLSSCAISFCKSVKAEYAVAKSILTLAKWIQAEWKEISGQLKQVYRAQHQQNFTGLSTLSKNILTLIELPSVNTMEEEYPRIESESTVHIGVGEPDFILGQLYHLSSVQAPEVAKSWAASWAYRWGRKVVDNASQGEGVRLLPREKSEVQNLLPDTITEEEKERIYGILGQAVCRPAGIQDEDITLQITESEDNEEDDMVDVIWRQLISSCPWLSELDESATEGVIKVWRKVVDRIFSLYKLSCSAYFTFLKLNAGQIPLDEDDPRLHLSHRVEQSTDDMIVMATLRLLRLLVKHAGELRQYLEHGLETTPTAPWRGIIPQLFSRLNHPEVYVRQSICNLLCRVAQDSPHLILYPAIVGTISLSSESQASGNKFSTAIPTLLGNIQGEELLVSECEGGSPPASQDSNKDEPKSQEDQAMMQDCKIVDKLSSANPTMVLQVQMLVAELRRVTVLWDELWLGVLLQQHMYVLRRIQQLEDEVKRVQNNNTLRKEEKIAIMREKHTALMKPIVFALEHVRSITAAPAETFKWFQDNYGDAIENALEKLKTPLNPAKPGSSWIPFKEIMLSLQQRAQKRASYILRLEEISPWLAAMTNTEIALPGEVSARDTVTIHSVGGTITILPTKTKPKKLLFLGSDGKSYPYLFKGLEDLHLDERIMQFLSIVNTMFATINRQETPRFHARHYSVTPLGTRSGLIQWVDGATPLFGKRWQQREAALQAQKAQDSYQTPQNPGIVPRPSELYYSKIGPALKTVGLSLDVSRRDWPLHVMKAVLEELMEATPPNLLAKELWSSCTTPDEWWRVTQSYARSTAVMSMVGYIIGLGDRHLDNVLIDMTTGEVVHIDYNVCFEKGKSLRVPEKVPFRMTQNIETALGVTGVEGVFRLSCEQVLHIMRRGRETLLTLLEAFVYDPLVDWTAGGEAGFAGAVYGGGGQQAESKQSKREMEREITRSLFSSRVAEIKVNWFKNRDEMLVVLPKLDGSLDEYLSLQEQLTDVEKLQGKLLEEIEFLEGAEGVDHPSHTLQHRYSEHTQLQTQQRAVQEAIQVKLNEFEQWITHYQAAFNNLEATQLASLLQEISTQMDLGPPSYVPATAFLQNAGQAHLISQCEQLEGEVGALLQQRRSVLRGCLEQLHHYATVQYPKAIFQKHRIEQWKTWMEELICNTTVERCQELYRKYEMQYAPQPPPTVCQFITATEMTLQRYAADINSRLIRQVERLKQEAVTVPVCEDQLKEIERCIKVFLHENGEEGSLSLASVIISALCTLTRRNLMMEGAASSAGEQLVDLTSRDGAWFLEELCSMSGNVTCLVQLLKQCHLVPQDLDIPNPMEASETVHLANGVYTSLQELNSNFRQIIFPEALRCLMKGEYTLESMLHELDGLIEQTTDGVPLQTLVESLQAYLRNAAMGLEEETHAHYIDVARLLHAQYGELIQPRNGSVDETPKMSAGQMLLVAFDGMFAQVETAFSLLVEKLNKMEIPIAWRKIDIIREARSTQVNFFDDDNHRQVLEEIFFLKRLQTIKEFFRLCGTFSKTLSGSSSLEDQNTVNGPVQIVNVKTLFRNSCFSEDQMAKPIKAFTADFVRQLLIGLPNQALGLTLCSFISALGVDIIAQVEAKDFGAESKVSVDDLCKKAVEHNIQIGKFSQLVMNRATVLASSYDTAWKKHDLVRRLETSISSCKTSLQRVQLHIAMFQWQHEDLLINRPQAMSVTPPPRSAILTSMKKKLHTLSQIETSIATVQEKLAALESSIEQRLKWAGGANPAPVLQDFEATIAERRNLVLKESQRASQVTFLCSNIIHFESLRTRTAEALNLDAALFELIKRCQQMCSFASQFNSSVSELELRLLQRVDTGLEHPIGSSEWLLSAHKQLTQDMSTQRAIQTEKEQQIETVCETIQNLVDNIKTVLTGHNRQLGDVKHLLKAMAKDEEAADGEDVPYENSVRQFLGEYKSWQDNIQTVLFTLVQAMGQVRSQEHVEMLQEITPTLKELKTQSQSIYNNLVSFDLVTDATNECSSPTSSATYQPSFAAAVRSNTGQKTQPDVMSQNARKLIQKNLATSADTPPSTVPGTGKSVACSPKKAVRDPKTGKAVQERNSYAVSVWKRVKAKLEGRDVDPNRRMSVAEQVDYVIKEATNLDNLAQLYEGWTAWV

SEQ ID NO: 192 - DNA, 4547 bp, Homo sapiens
gcggcgggcggagccgggaggcggggaagcagtggccgtgtgagcgtgaggagctgccgccaccgcctgctcctcgtcgtcctcgtcctccggggccccggcgacgtgggccgcgcacggccctggaaaagacgtcgcctccccttcatccgcctctctctcaccgcgccgctcccgcctcctcgtcctgcgctgcgggctcaggcggaacccggaacggccgtcctcttcccccgccctccgccgcctcctccttctcctccttctcggcttcctcctcagccccgggccggagcggggtgtcggcggcggccggttcgggcggcgactcgcgcttctttgggcggcggcgcttggccatgtcgtgtcggggaaggtaatgagccgcagagccccggggtctcggctgagcagcggcggcggcggcggcggcaccaagtatccgcggagctggaatgactggcaacccagaactgatagtgcatcagccgacccagataatttaaaatattcttcatccagagatagaggtggttcttcctcttatggactgcaaccttcaaattcagctgtggtgtctcggcaaaggcacgatgataccagagtccacgctgacatacagaatgacgaaaagggtggctacagtgtcaatggaggatctggggaaaatacttatggtcggaagtcgttggggcaagagctgagggttaacaatgtgaccagccctgagttcaccagtgttcagcatggcagtcgtgctttagccaccaaagacatgaggaaatcacaggagagatcgatgtcttattctgatgagtctcgactgtcgaatcttcttcggaggatcacccgggaagacgacagagaccgaagattggctactgtaaagcagttgaaagaatttattcagcaaccagaaaataagctggtactagttaaacaattggataatatcttggctgctgtacatgacgtgcttaatgaaagtagcaaattgcttcaggagttgagacaggagggagcttgctgtctcggccttctttgtgcttctctgagctatgaggctgagaagatcttcaagtggatttttagcaaatttagctcatctgcaaaagatgaagttaaactcctctacttatgtgccacctacaaagcactagagactgtaggagaaaagaaagccttttcatctgtaatgcagcttgtaatgaccagcctgcagtctattcttgaaaatgtggatacaccagaattgctttgtaaatgtgttaagtgcattcttttggtggctcgatgttaccctcatattttcagcactaattttagggatacagttgatatattagttggatggcatatagatcatactcagaaaccttcgctcacgcagcaggtatctgggtggttgcagagtttggagccattttgggtagctgatcttgcattttctactactcttcttggtcagtttctggaagacatggaagcatatgctgaggacctcagccatgtggcctctggggaatcagtggatgaagatgtccctcctccatcagtgtcattaccaaagctggctgcacttctccgggtatttagtactgtggtgaggagcattggggaacgcttcagcccaattcggggtcctccaattactgaggcatatgtaacagatgttctgtacagagtaatgagatgtgtgacggctgcaaaccaggtgtttttttctgaggctgtgttgacagctgctaatgagtgtgttggtgttttgctcggcagcttggatcctagcatgactatacattgtgacatggtcattacatatggattagaccaactggagaattgccagacttgtggtaccgattatatcatctcagtcttgaatttactcacgctgattgttgaacagataaatacgaaactgccatcatcatttgtagaaaaactgtttataccatcatctaaactactattcttgcgttatcataaagaaaaagaggttgttgctgtagcccatgctgtttatcaagcagtgctcagcttgaagaatattcctgttttggagactgcctataagttaatattgggagaaatgacttgtgccctaaacaacctcctacacagtctacaacttcctgaggcctgttctgaaataaaacatgaggcttttaagaatcatgtgttcaatgtagacaatgcaaaatttgtagttatatttgacctcagtgccctgactacaattggaaatgccaaaaactcactaataggggtgagtctttaattgtaatgactttgttttatccacagttaagccttttctcattacatatttatgtatttcactgtcatgtcaagatgtctgcagaatcactgtgtgtaacaaacagccatatttaagacatgcctggataaataaaattggtaggaatgttttcttggcattatatttaacttttcttcttctttttccttgacaaatcttgataagtttttttatattagttttattttctagaaaatgtcttatgaatttctcctatttgctctagcatgcttatagaaaatgtcagtgtttcttacagctcaaatttgtgtagttgttttaaaatgcggtctctttcttcttcccctggtacttttttctttctgtctactgaagttagttcttatacatggtcttatattttggctgtctcttttccctaggaacattcatacaggttgaatattccttatctgaaatacttgggactggaagtgttttggattttggattttggaatactttttttttttttttggagatggggttttactcttgttgcccaggctggagtgcaatggcgcgatcttggctcgctgcaacctccgcctcccgggtacaagcgattctcctgtttcagcctcccaggtagctcggattacaggcatgcaccaccatgcctggctaatttttttgtatttagtagagatgggttttcaccatgttagccgggctggttgtgaactcctgacctcaggtgatccacctgccttggcctcccaaaatgctgggattacaggtgggcaccaccatgcccagccggattttggagtattttcataacacttactggtgagcatccctaatctgaaaatcctaaatctaaaatgctccaaaatttgaaactttttgagcaccagtatgatgccccaagtggaaaatcccacacctgatctcatgtgatgagtccaaactgttgtatgcacaaaattatttaaaatattgcataaaatgaccttcaggctatgaatagaaggtgtctatgaaacataagtgaatttcgtgtttagacttgggtcccatcctccacatatctcattttatatatatgcaagtattctcaaatccaaaaatatacaaagtctgaaacacttctggtcccaagcattatgaatgagggatactcaacccgtagtctttcttttaggggaaaaaaaaaaaaaaggcttttttttttttttttttgagacagagtcatgctgttgtcgcctgggctggagtgcagtggtgcaatctcggctcactgccacctctgcctcccgggttccagcaattctcctgcctcagcctcctgagcagctgagattacagacacctaccactacgacgggctaatttttgtatttttagtagagacttggtttcaccatgttggccaggctggtctcaaactcctgacctcaggtgatccacccgcctcagcctcccaaagtgctggaattacaggcgtgagccaccgcgcccagcctgcttttttttttttttttttttaagtaattcgacatggccctgctcttgatttgtatttattgtttatggtttgtgtatttcttcttcctattggaccacacagagttgaaaaacattctttttaatagaaagtaataggtgtgggctgggcacggttgctgacacctgtaaacccagcactctgggaggccaagtcgggctgatcacttgtggtcaggagtttgagaccagcctggccaacatggtgaaacctcgcctctactaaaaatagaaaaattagccaggggtggtggtgcacacctgtaatcctagctactttggaggctaagttgggagaattgcttgaacccaggaagtggaggttgcagtgagctgagatcacaccactgcactccagtctgggcgacagaaccagactctgtctcaaaagaaaaaaaacacaaagaaagaaagtaatggacataattagggaataaagtttttaggaggaaaaaggtaaaacttgatgtttgcgcttacatgtgctctgggttgtttgattggattgccttgtataattccatagctgcttcgcttattaccagttacagcttatgtttgaagtcacaataaattcttcttcgaacacgaaagcttgatttttgaggaattcacattatttacagattcagagatgtttatgtcctgtactctagaaataaggagaaagtgggtggggatggggcagtcaggtggaatggagtgtcttggcagt

SEQ ID NO: 193 - protein, 629 aa, Homo sapiens
MSRRAPGSRLSSGGGGGGTKYPRSWNDWQPRTDSASADPDNLKYSSSRDRGGSSSYGLQPSNSAVVSRQRHDDTRVHADIQNDEKGGYSVNGGSGENTYGRKSLGQELRVNNVTSPEFTSVQHGSRATKDMRKSQERSMSYSDESRLSNLLRRITREDDRDRRLATVKQLKEFIQQPENKLVLVKQLDNILAAVHDVLNESSKLLQELRQEGACCLGLLCASLSYEAEKIFKWIFSKFSSSAKDEVKLLYLCATYKALETVGEKKAFSSVMQLVMTSLQSINVDTPELLCKCVKCILLVARCYPHIFSTNFRDTVDILVGWHIDHTQKPSLTQQVSGWLQSLEPFWVADLAFSTTLLGQFLEDMEAYAEDLSHVASGESVDEDVPPPSVSLPKLAALLRVFSTVVRSIGERFSPIRGPPITEAYVTDVLYRVMRCVTAANQVFFSEAVLTAANECVGVLLGSLDPSMTIHCDMVITYGLDQLENCQTCGTDYIISVLNLLTLIVEQINTKLPSSFVEKLFIPSSKLLFLRYHKEKEVVAVAHAVYQAVLSLKNIPVLETAYKLILGEMTCALNNLLHSLQLPEACSEIKHEAFKNHVFNVDNAKFVVIFDLSALTTIGNAKNSLIGVSL

SEQ ID NO: 194 - DNA, 14877 bp, Homo sapiens
gcggcgggcggagccgggaggcggggaagcagtggccgtgtgagcgtgaggagctgccgccaccgcctgctcctcgtcgtcctcgtcctccggggccccggcgacgtgggccgcgcacggccctggaaaagacgtcgcctccccttcatccgcctctctctcaccgcgccgctcccgcctcctcgtcctgcgctgcgggctcaggcggaacccggaacggccgtcctcttcccccgccctccgccgcctcctccttctcctccttctcggcttcctcctcagccccgggccggagcggggtgtcggcggcggccggttcgggcggcggcgcttggccatgtcgtgtcggggaaggtaatgagccgcagagccccggggtctcggctgagcagcggcggcggcggcggcggcaccaagtatccgcggagctggaatgactggcaacccagaactgatagtgcatcagccgacccagataatttaaaatattcttcatccagagatagaggtggttcttcctcttatggactgcaaccttcaaattcagctgtggtgtctcggcaaaggcacgatgataccagagtccacgctgacatacagaatgacgaaaaggagagatcgatgtcttattctgatgagtctcgactgtcgaatcttcttcggaggatcacccgggaagacgacagagaccgaagattggctactgtaaagcagttgaaagaatttattcagcaaccagaaaataagctggtactagttaaacaattggataatatcttggctgctgtacatgacgtgcttaatgaaagtagcaaattgcttcaggagttgagacaggagggagcttgctgtctcggccttctttgtgcttctctgagctatgaggctgagaagatcttcaagtggatttttagcaaatttagctcatctgcaaaagatgaagttaaactcctctacttatgtgccacctacaaagcactagagactgtaggagaaaagaaagccttttcatctgtaatgcagcttgtaatgaccagcctgcagtctattcttgaaaatgtggatacaccagaattgctttgtaaatgtgttaagtgcattcttttggtggctcgatgttaccctcatattttcagcactaattttagggatacagttgatatattagttggatggcatatagatcatactcagaaaccttcgctcacgcagcaggtatctgggtggttgcagagtttggagccattttgggtagctgatcttgcattttctactactcttcttggtcagtttctggaagacatggaagcatatgctgaggacctcagccatgtggcctctggggaatcagtggatgaagatgtccctcctccatcagtgtcattaccaaagctggctgcacttctccgggtatttagtactgtggtgaggagcattggggaacgcttcagcccaattcggggtcctccaattactgaggcatatgtaacagatgttctgtacagagtaatgagatgtgtgacggctgcaaaccaggtgtttttttctgaggctgtgttgacagctgctaatgagtgtgttggtgttttgctcggcagcttggatcctagcatgactatacattgtgacatggtcattacatatggattagaccaactggagaattgccagacttgtggtaccgattatatcatctcagtcttgaatttactcacgctgatgtgggcgctatctccaactgtctttgcacttctgagtaagaatctgatgattgtgcacagtgacctggctgttcacttccctgccattcagtatgctgtgctctacacattgtattctcattgtaccagatgtgtcgatgtttgccgtgttcaactagtgcacagtggaactcgtattcgacaagcatttggaaaactgttgaaatcaattcctttagatgttgtcctaagcaataacaatcacacagaaattcaagaaatttctttagcattaagaagtcacatgagtaaagcaccaagtaatacattccacccccaagatttctctgatgttattagttttattttgtatgggaactctcatagaacagggaaggacaattggttggaaagactgttctatagctgccagagactggataagcgtgaccagtcaacaattccacgcaatctcctgaagacagatgctgtcctttggcagtgggccatatgggaagctgcacaattcactgttctttctaagctgagaaccccactgggcagagctcaagacaccttccagacaattgaaggtatcattcgaagtctcgcagctcacacattaaaccctgatcaggatgttagtcagtggacaactgcagacaatgatgaaggccatggtaacaaccaacttagacttgttcttcttctgcagtatctggaaaatctggagaaattaatgtataatgcatacgagggatgtgctaatgcattaacttcacctcccaaggtcattagaacttttttctataccaatcgccaaacttgtcaggactggctaacgcggattcgactctccatcatgagggtaggattgttggcaggccagcctgcagtgacagtgagacatggctttgacttgcttacagagatgaaaacaaccagcctatctcaggggaatgaattggaagtaaccattatgatggtggtagaagcattatgtgaacttcattgtcctgaagctatacagggaattgctgtctggtcatcatctattgttggaaaaaatcttctgtggattaactcagtggctcaacaggctgaagggaggtttgaaaaggcctctgtggagtaccaggaacacctgtgtgccatgacaggtgttgattgctgcatctccagctttgacaaatcggtgctcaccttagccaatgctgggcgtaacagtgccagcccgaaacattctctgaatggtgaatccagaaaaactgtgctgtccaaaccgactgactcttcccctgaggttataaattatttaggaaataaagcatgtgagtgctacatctcaattgccgattgggctgctgtgcaggaatggcagaacgctatccatgacttgaaaaagagtaccagtagcacttccctcaacctgaaagctgacttcaactatataaaatcattaagcagctttgagtctggaaaatttgttgaatgtaccgagcagttagaattgttaccaggagaaaatatcaatctacttgctggaggatcaaaagaaaaaatagacatgaaaaaactgcttcctaacatgttaagtccggatccgagggaacttcagaaatccattgaagttcaattgttaagaagttctgtttgtttggcaactgctttaaacccgatagaacaagatcagaagtggcagtctataactgaaaatgtggtaaagtacttgaagcaaacatcccgcatcgctattggacctctgagactttctactttaacagtttcacagtctttgccagttctaagtaccttgcagctgtattgctcatctgctttggagaacacagtttctaacagactttcaacagaggactgtcttattccactcttcagtgaagctttacgttcatgtaaacagcatgacgtgaggccatggatgcaggcattaaggtatactatgtaccagaatcagttgttggagaaaattaaagaacaaacagtcccaattagaagccatctcatggaattaggtctaacagcagcaaaatttgctagaaaacgagggaatgtgtcccttgcaacaagactgctggcacagtgcagtgaagttcagctgggaaagaccaccactgcacaggatttagtccaacattttaaaaaactatcaacccaaggtcaagtggatgaaaaatgggggcccgaacttgatattgaaaaaaccaaattgctttatacagcaggccagtcaacacatgcaatggaaatgttgagttcttgtgccatatctttctgcaagtctgtgaaagctgaatatgcagttgctaaatcaattctgacactggctaaatggatccaggcagaatggaaagagatttcaggacagctgaaacaggtttacagagctcagcaccaacagaacttcacaggtctttctactttgtctaaaaacatactcactctaatagaactgccatctgttaatacgatggaagaagagtatcctcggatcgagagtgaatctacagtgcatattggagttggagaacctgacttcattttgggacagttgtatcacctgtcttcagtacaggcacctgaagtagccaaatcttgggcagcgttggccagctgggcttataggtggggcagaaaggtggttgacaatgccagcattttgtgcacaatttttcttcaggatgaagatataacacttcagataactgagagtgaagacaacgaagaagatgacatggttgatgttatctggcgtcagttgatatcaagctgcccatggctttcagaacttgatgaaagtgcaactgaaggagttattaaagtgtggaggaaagttgtagatagaatattcagcctgtacaaactctcttgcagtgcatactttactttccttaaactcaacgctggtcaaattcctttagatgaggatgaccctaggctgcatttaagtcacagagtggaacagagcactgatgacatgattgtgatggccacattgcgcctgctgcggttgctcgtgaagcacgctggtgagcttcggcagtatctggagcacggcttggagacaacacccactgcaccatggagaggaattattccgcaacttttctcacgcttaaaccaccctgaagtgtatgtgcgccaaagtatttgtaaccttctctgccgtgtggctcaagattccccacatctcatattgtatcctgcaatagtgggaagtcctcctgcatctcaggatagcaataaggatgaacctaaaagtggattaaatgaagaccaagccatgatgcaggattgttacagcaaaattgtagataagctgtcctctgcaaaccccaccatggtattacaggttcagatgctcgtggctgaactgcgcagggtcactgtgctctgggatgagctctggctgggagttttgctgcaacaacacatgtatgtcctgagacgaattcagcagcttgaagatgaggtgaagagagtccagaacaacaacaccttacgcaaagaagagaaaattgcaatcatgagggagaagcacacagctttgatgaagcccatcgtatttgctttggagcatgtgaggagtatcacagcggctcctgcagaaacacctcatgaaaaatggtttcaggataactatggtgatgccattgaaaatgccctagaaaaactgaagactccattgaaccctgcaaagcctgggagcagctggattccatttaaagagataatgctaagtttgcaacagagagcacagaaacgtgcaagttacatcttgcgtcttgaagaaatcagtccatggttggctgccatgactaacactgaaattgctcttcctggggaagtctcagccagagacactgtcacaatccatagtgtgggcggaaccatcacaatcttaccgactaaaaccaagccaaagaaacttctctttcttggatcagatgggaagagctatccttatcttttcaaaggactggaggatttacatctggatgagagaataatgcagttcctatctattgtgaataccatgtttgctacaattaatcgccaagaaacaccccggttccatgctcgacactattctgtaacaccactaggaacaagatcaggactaatccagtgggtagatggagccacacccttatttggtctttacaaacgatggcaacaacgggaagctgccttacaagcacaaaaggcccaagattcctaccaaactcctcagaatcctggaattgtaccccgtcctagtgaactttattacagtaaaattggccctgctttgaaaacagttgggcttagcctggatgtgtcccgtcgggattggcctcttcatgtaatgaaggcagtattggaagagttaatggaggccacacccccgaatctccttgccaaagagctctggtcatcttgcacaacacctgatgaatggtggagagttacgcagtcttatgcaagatctactgcagtcatgtctatggttggatacataattggccttggagacagacatctggataatgttcttatagatatgacgactggagaagttgttcacatagattacaatgtttgctttgaaaaaggtaaaagccttagagttcctgagaaagtaccttttcgaatgacacaaaacattgaaacagcactgggtgtaactggagtagaaggtgtatttaggctttcatgtgagcaggttttacacattatgcggcgtggcagagagaccctgctgacgctgctggaggcctttgtgtacgaccctctggtggactggacagcaggaggcgaggctgggtttgctggtgctgtctatggtggaggtggccagcaggccgagagcaagcagagcaagagagagatggagcgagagatcacccgcagcctgttttcttctagagtagctgagattaaggtgaactggtttaagaatagagatgagatgctggttgtgcttcccaagttggacggtagcttagatgaatacctaagcttgcaagagcaactgacagatgtggaaaaactgcagggcaaactactggaggaaatagagtttctagaaggagctgaaggggtggatcatccttctcatactctgcaacacaggtattctgagcacacccaactacagactcagcaaagagctgttcaggaagcaatccaggtgaagctgaatgaatttgaacaatggataacacattatcaggctgcattcaataatttagaagcaacacagcttgcaagcttgcttcaagagataagcacacaaatggaccttggtcctccaagttacgtgccagcaacagcctttctgcagaatgctggtcaggcccacttgattagccagtgcgagcagctggagggggaggttggtgctctcctgcagcagaggcgctccgtgctccgtggctgtctggagcaactgcatcactatgcaaccgtggccctgcagtatccgaaggccatatttcagaaacatcgaattgaacagtggaagacctggatggaagagctcatctgtaacaccacagtagagcgttgtcaagagctctataggaaatatgaaatgcaatatgctccccagccacccccaacagtgtgtcagttcatcactgccactgaaatgaccctgcagcgatacgcagcagacatcaacagcagacttattagacaagtggaacgcttgaaacaggaagctgtcactgtgccagtttgtgaagatcagttgaaagaaattgaacgttgcattaaagttttccttcatgagaatggagaagaaggatctttgagtctagcaagtgttattatttctgccctttgtacccttacaaggcgtaacctgatgatggaaggtgcagcgtcaagtgctggagaacagctggttgatctgacttctcgggatggagcctggttcttggaggaactctgcagtatgagcggaaacgtcacctgcttggttcagttactgaagcagtgccacctggtgccacaggacttagatatcccgaaccccatggaagcgtctgagacagttcacttagccaatggagtgtatacctcacttcaggaattgaattcgaatttccggcaaatcatatttccagaagcacttcgatgtttaatgaaaggggaatacacgttagaaagtatgctgcatgaactggacggtcttattgagcagaccaccgatggcgttcccctgcagactctagtggaatctcttcaggcctacttaagaaacgcagctatgggactggaagaagaaacacatgctcattacatcgatgttgccaggcaagtgaatgctggctgtgccgtttccttactactacatgctcagtacggtgaattaatccaaccgagaaatggttcagttgatgaaacacccaaaatgtcagctggccagatgcttttggtagcattcgatggcatgtttgctcaagttgaaactgctttcagcttattagttgaaaagttgaacaagatggaaattcccatagcttggcgaaagattgacatcataagggaagccaggagtactcaagttaatttttttgatgatgataatcaccggcaggtgctagaagagattttctttctaaaaagactacagactattaaggagttcttcaggctctgtggtaccttttctaaaacattgtcaggatcaagttcacttgaagatcagaatactgtgaatgggcctgtacagattgtcaatgtgaaaaccctttttagaaactcttgtttcagtgaagaccaaatggccaaacctatcaaggcattcacagctgactttgtgaggcagctcttgatagggctacccaaccaagccctcggactcacactgtgcagttttatcagtgctctgggtgtagacatcattgctcaagtagaggcaaaggactttggtgccgaaagcaaagtttctgttgatgatctctgtaagaaagcggtggaacataacatccagatagggaagttctctcagctggttatgaacagggcaactgtgttagcaagttcttacgacactgcctggaagaagcatgacttggtgcgaaggctagaaaccagtatttcttcttgtaagacaagcctgcagcgggttcagctgcatattgccatgtttcagtggcaacatgaagatctacttatcaatagaccacaagccatgtcagtcacacctcccccacggtctgctatcctaaccagcatgaaaaagaagctgcataccctgagccagattgaaacttctattgcaacagttcaggagaagctagctgcacttgaatcaagtattgaacagcgactcaagtgggcaggtggtgccaaccctgcattggcccctgtactacaagattttgaagcaacgatagctgaaagaagaaatcttgtccttaaagagagccaaagagcaagtcaggtcacatttctctgcagcaatatcattcattttgaaagtttacgaacaagaactgcagaagccttaaacctggatgcggcgttatttgaactaatcaagcgatgtcagcagatgtgttcgtttgcatcacagtttaacagttcagtgtctgagttagagcttcgtttattacagagagtggacactggtcttgaacatcctattggcagctctgaatggcttttgtcagcacacaaacagttgacccaggatatgtctactcagagggcaattcagacagagaaagagcagcagatagaaacggtctgtgaaacaattcagaatctggttgataatataaagactgtgctcactggtcataaccgacagcttggagatgtcaaacatctcttgaaagctatggctaaggatgaagaagctgctctggcagatggtgaagatgttccctatgagaacagtgttaggcagtttttgggtgaatataaatcatggcaagacaacattcaaacagttctatttacattagtccaggctatgggtcaggttcgaagtcaagaacacgttgaaatgctccaggaaatcactcccaccttgaaagaactgaaaacacaaagtcagagtatctataataatttagtgagttttgcatcacccttagtcaccgatgcaacaaatgaatgttcgagtccaacgtcatctgctacttatcagccatccttcgctgcagcagtccggagtaacactggccagaagactcagcctgatgtcatgtcacagaatgctagaaagctgatccagaaaaatcttgctacatcagctgatactccaccaagcaccgttccaggaactggcaagagtgttgcttgtagtcctaaaaaggcagtcagagaccctaaaactgggaaagcggtgcaagagagaaactcctatgcagtgagtgtgtggaagagagtgaaagccaagttagagggccgagatgttgatccgaataggaggatgtcagttgctgaacaggttgactatgtcattaaggaagcaactaatctagataacttggctcagctgtatgaaggttggacagcctgggtgtgaatggcaagacagtagatgagtctggttaagcgaggtcagacatccaccagaatcaactcagcctcaggcatccaaagccacaccacagtcggtggtgatgcaactgggggcttactctgaggaaacctaggaaatctcggtgcactaggaagtgaatcccgcaggacagctgcactcagggatacgcccaacaccatggcctgcaaccccagggtcaagggtgaaggaaagcaagctcaccgcctgaacacggagattgtctttctgccacagaacagcagcagacgtgtcgggaggttagctgcggaaagaaatcgggatgccgcggagcacagagtgatttggaactccattccacctgaccctgtgtgtacaatccaggaaaaaaacaaaccccactcagaaacagagaaaactggggtcgcgaagaaatcacagccaaggaagatttgatgcattcagattctcgtgtaacacttgttgcttggcaacagtactggttgggttgaccagtaagtagaaaaaggctaaaggctatgcgatatgaatttcagaaatggactgaaaatggagagctatgtaacagatacactacagtagaagaacttacttctgaaatgaagggaaaaaaaccaccccatcgttccctactcctccccaccacttacccgttccccctttacctaatctagtagattagccatctttcaaattcacttttatttcagtccttatatttcatatacttccgtctcgatgctgttaacaacttctgataacatggaaaattcaaggattgtttaaaggtctgatgatcacacacaaaatgtaattccggttatttaagtcatttctgtgattctatcatgtacagtttccagaattgtcactgtgcattcaaaagtaatgaatctaacagacatttgatttaatgtacactcccttttgcttatagtgtgcattttttttggaggtcattcaaattttccctcttctgtgatagctgtagtttctttcatagaaagtagctaatccagtgtaatcttttacctttttaaaaaccaagatagagtatctattagagttttacattgttgatgatagattaacaataaagtgatgttctggtggaggtagactgaaatttttttaattcatgtttttcatttgatacttttaatttacacttagtaaattaaaagttgtttaatttacttggcattttaggacatgtacatgaaacagtgaaaatgagatccaccaacatcttttattaagttcagttattagtctgtgaagtgctttactttttgcacaattttaatagcttgctattcagtaatacattatagtgaattcatgatcaaggtttccttaaatttagcattgcatttcagtactgactgtgtaagctaaattgctgatccaaaataaaaacccagactagaatagggttcttaaaatcaagtatcaatacaaaatagaacacaattaaaatcttaattgttggctgggcacagtggctcacgcctgtaatcccagcactttgggaggccgaggcgggcggatcatgaggttaggagagcgagaccatcctggctaacacggtgaaaccccgtctttactaaaaatacaaaaaaaattagccgggcgtggtggcgggcgcctgtagtcccagctactcgggaggctgaggcaggagaatggcgtgaacccaggaggcggagcttgcagtgagccgagattgtgccactgcactccagcctgggcaacagagctagactctgtgtcaaaaataaatgactagataaaaaaaaaaattgtttgagtacattttccctgcattttagagattaggacagtggtcactttctagttgccgtcttcacagacaaacttgaaaggtattaaggaaaaaattccacatagctctgggccttttttgtattctgattgccacgttaatctgtaatcgttaagtacccatgaaagaatgtgtttcagtatcagtgcttttttggtactttaacaagtattgtaggcacggtggatttttttgaaatacccatgtgtccaatagcaagttaaggaacctagcgcatcaaattttgttttcttcattcatttggaaccttattttcgcaaaaaacctagctggaataataatgccatattgtattttgcacactgctttattttctagaggctctgggagcaaattacattcatcacattacctctgctctctcaagattaaagtctttcagcaacattctttattgtcatcataaggaaaaacttttatcgcaatgatagtcagttcacattagtttagcactatagatagtattcagaaattgctttctctttggtaaagaagataaataggtgaattttattgcctgtgttttcaggcttcagaggtacctggcaccttactcaagcaaaaacaaaaaacagctttacttcaaaagcatgtgcctctggtaaattatccatcacttttgttttaaagtggtccctccaagaataatgtggcatacacagtgggtttggttgtaaggcagatgtaatagatgacttcaaaagcctgctccttactgcactctggacaaggccctggtctgtatagtttggcttcctctgttaagtcattctacaaggtgacttgccatttgaactttcgtaagagacctcagcagttagactgagaaaagttagagtgctgtagttatgaagtcatacatttttgataaaatacctgtggaaaaccagggatcctctcctgtttctctctcttgcctccccctttccctccattcctctgtcgcctccccctctcctccactttctttaagaatcagggggtacagaataacctacaaacaacctcttcaaagtacccttggaaattgaagttcaatcttaagttttttgctgtctttaatttactagaattgcctaatttttagttgatttctctacagagcttagcttgtgtagttatttctcttttactgttgctttggtgtgtcttgaagtttgattgattatttttggtcattgagttcttagtgtagtttgctagatgattattaagattcttttgtgtctgacacttgtggtgagttgcttttgaaatctgttgagatttccatgtgagaactgataatcaggctcttgatctgcttccctaaattacttttttagagcccaaaccccaggtttagggtgagggtttgtaatacaaagaaacacttccatcacttctgcccttaacccttgcctctattacctaagcttagtaagtagttttcttaatattgtccaatgtttggtgttatctgcattgttttttgtttttttaattgtggttgttctgacgtgtgaaatttaaggaaagagccattttttaaaaatgccgagcagggcaatgcaagtacagccaaatattagacttgatgtgcaatcttcggtcctttttaatctggggtattataggcagtactttaaattgcaaagtcttccgggcctattttcctctacatttttgtaattaactctgggggcttacttgttttggcagtactgaaatcaaaggagctggttcttcttttctcccaattattttcatatgaaagcacctacaattagcctgttagtcctattcagatacatcaaatatcagtgaatgctttactattcgcacatttaagcatctttgttttacataaaattagagtatgaaaaccagtgttcaattttttatcttgttgagcttgtaaaatgccagcaatttaaaactaggacttttccccccataagccaaggaggtagaattactaatacaagggttaaagaaggtagattttgttttcaatatttgggtaatattagaaagattcttcccacagggaagaactagcaagtgtcccaattttttccaaacgttggggaggggaaaattcactgtatcatgaaaccctaagggtttgttgcacttcctgctttttaggcctggataacagtatcaccatccttatttacagaagggtaaaactgactcttaatgagaaaagctttataagttcaagggctgtaaaatatgaactacttagggtcgtttgccttccatgggaacttggctagacttagaaaaagctgtttgttgtgctaatgtaaaagtgtcatacaatttagaagatttttgaagatggtaaacttagaagaattctatgttctgaaatgcacacttttagaatgtttttctttgaaaacaggctaatagttttttctttttttgacaaagtttcagctcctctttaaagttattgtgtcatttttctggtttaaatttcccttatatttccacctgtaatgtcagtggcaacaacatcatacttcacttacttgttaatttactttttacccttattctaagagcaagttgagttgaactgaatcttccttgtcttagtaacaatgtataaatagtggcttttctgtacaaaaggttgtaatgcctcctgatggatataattttgtgattgtatttaaaagttgaataaatcacaccagcttcctgaaaatgttcataatgcatcttttggaaaacaaatacatgcctacttt

SEQ ID NO: 195 - protein, 3271 aa, Homo sapiens
MSRRAPGSRLSSGGGGGGTKYPRSWNDWQPRTDSASADPDNLKYSSSRDRGGSSSYGLQPSNSAVVSRQRHDDTRVHADIQNDEKERSMSYSDESRLSNLLRRITREDDRDRRLATVKQLKEFIQQPENKLVLVKQLDNILAAVHDVLNESSKLLQELRQEGACCLGLLCASLSYEAEKIFKWIFSKFSSSAKDEVKLLYLCATYKALETVGEKKAFSSVMQLVMTSLQSINVDTPELLCKCVKCILLVARCYPHIFSTNFRDTVDILVGWHIDHTQKPSLTQQVSGWLQSLEPFWVADLAFSTTLLGQFLEDMEAYAEDLSHVASGESVDEDVPPPSVSLPKLAALLRVFSTVVRSIGERFSPIRGPPITEAYVTDVLYRVMRCVTAANQVFFSEAVLTAANECVGVLLGSLDPSMTIHCDMVITYGLDQLENCQTCGTDYIISVLNLLTLMWALSPTVFALLSKNLMIVHSDLAVHFPAIQYAVLYTKHCTRCVDVCRVQLVHSGTRIRQAFGKLLKSIPLDVVLSNNNHTEIQEISLALRSHMSKAPSNTFHPQDFSDVISFILYGNSHRTGKDNWLERLFYSCQRLDKRDQSTIPRNLLKTDAVLWQWAIWEAAQFTVLSKLRTPLGRAQDTFQTIEGIIRSLAAHTLNPDQDVSQWTTADNDEGHGNNQLRLVLLLQYLENLEKLMYNAYEGCANALTSPPKVIRTFFYTNRQTCQDWLTRIRLSIMRVGLLAGQPAVTVRHGFDLLTEMKTTSLSQGNELEVTIMMVVEALCELHCPEAIQGIAVWSSSIVGKNLLWINSVAQQAEGRFEKASVEYQEHLCAMTGVDCCISSFDKSVLTLANAGRNSDKHSLNGESRKTVLSKPTDSSPEVINYLGNKACECYISIADWAAVQEWQNAIHDLKKSTSSTSLNLKADFNYIKSLSSFESGKFVECTEQLELLPGENINLLAGGSKEKIDMKKLLPNMLSPDPRELQKSIEVQLLRSSVCLATALNPIEQDQKWQSITENVVKYLKQTSRIAIGPLRLSTLTVSQSLPVLSTLQLYCSSALENTVSNRLSTEDCLIPLFSEALRSCKQHDVRPWMQALRYTMYQNQLLEKIKEQTVPIRSHLMELGLTAAKFARKRGNVSLATRLLAQCSEVQLGKTTTAQDLVQHFKKLSTQGQVDEKWGPELDIEKTKLLYTAGQSTHAMEMLSSCAISFCKSVKAEYAVAKSILTLAKWIQAEWKEISGQLKQVYRAQHQQNFTGLSTLSKNILTLIELPSVNTMEEEYPRIESESTVHIGVGEPDFILGQLYHLSSVQAPEVAKSWAASWAYRWGRKVVDNASILCTIFLQDEDITLQITESEDNEEDDMVDVIWRQLISSCPWLSELDESATEGVIKVWRKVVDRIFSLYKLSCSAYFTFLKLNAGQIPLDEDDPRLHLSHRVEQSTDDMIVMATLRLLRLLVKHAGELRQYLEHGLETTPTAPWRGIIPQLFSRLNHPEVYVRQSICNLLCRVAQDSPHLILYPAIVGSPPASQDSNKDEPKSQEDQAMMQDCKIVDKLSSANPTMVLQVQMLVAELRRVTVLWDELWLGVLLQQHMYVLRRIQQLEDEVKRVQNNNTLRKEEKIAIMREKHTALMKPIVFALEHVRSITAAPAETFKWFQDNYGDAIENALEKLKTPLNPAKPGSSWIPFKEIMLSLQQRAQKRASYILRLEEISPWLAAMTNTEIALPGEVSARDTVTIHSVGGTITILPTKTKPKKLLFLGSDGKSYPYLFKGLEDLHLDERIMQFLSIVNTMFATINRQETPRFHARHYSVTPLGTRSGLIQWVDGATPLFGKRWQQREAALQAQKAQDSYQTPQNPGIVPRPSELYYSKIGPALKTVGLSLDVSRRDWPLHVMKAVLEELMEATPPNLLAKELWSSCTTPDEWWRVTQSYARSTAVMSMVGYIIGLGDRHLDNVLIDMTTGEVVHIDYNVCFEKGKSLRVPEKVPFRMTQNIETALGVTGVEGVFRLSCEQVLHIMRRGRETLLTLLEAFVYDPLVDWTAGGEAGFAGAVYGGGGQQAESKQSKREMEREITRSLFSSRVAEIKVNWFKNRDEMLVVLPKLDGSLDEYLSLQEQLTDVEKLQGKLLEEIEFLEGAEGVDHPSHTLQHRYSEHTQLQTQQRAVQEAIQVKLNEFEQWITHYQAAFNNLEATQLASLLQEISTQMDLGPPSYVPATAFLQNAGQAHLISQCEQLEGEVGALLQQRRSVLRGCLEQLHHYATVQYPKAIFQKHRIEQWKTWMEELICNTTVERCQELYRKYEMQYAPQPPPTVCQFITATEMTLQRYAADINSRLIRQVERLKQEAVTVPVCEDQLKEIERCIKVFLHENGEEGSLSLASVIISALCTLTRRNLMMEGAASSAGEQLVDLTSRDGAWFLEELCSMSGNVTCLVQLLKQCHLVPQDLDIPNPMEASETVHLANGVYTSLQELNSNFRQIIFPEALRCLMKGEYTLESMLHELDGLIEQTTDGVPLQTLVESLQAYLRNAAMGLEEETHAHYIDVARQVNAGCAVSLLLHAQYGELIQPRNGSVDETPKMSAGQMLLVAFDGMFAQVETAFSLLVEKLNKMEIPIAWRKIDIIREARSTQVNFFDDDNHRQVLEEIFFLKRLQTIKEFFRLCGTFSKTLSGSSSLEDQNTVNGPVQIVNVKTLFRNSCFSEDQMAKPIKAFTADFVRQLLIGLPNQALGLTLCSFISALGVDIIAQVEAKDFGAESKVSVDDLCKKAVEHNIQIGKFSQLVMNRATVLASSYDTAWKKHDLVRRLETSISSCKTSLQRVQLHIAMFQWQHEDLLINRPQAMSVTPPPRSAILTSMKKKLHTLSQIETSIATVQEKLAALESSIEQRLKWAGGANPAPVLQDFEATIAERRNLVLKESQRASQVTFLCSNIIHFESLRTRTAEALNLDAALFELIKRCQQMCSFASQFNSSVSELELRLLQRVDTGLEHPIGSSEWLLSAHKQLTQDMSTQRAIQTEKEQQIETVCETIQNLVDNIKTVLTGHNRQLGDVKHLLKAMAKDEEAADGEDVPYENSVRQFLGEYKSWQDNIQTVLFTLVQAMGQVRSQEHVEMLQEITPTLKELKTQSQSIYNNLVSFDLVTDATNECSSPTSSATYQPSFAAAVRSNTGQKTQPDVMSQNARKLIQKNLATSADTPPSTVPGTGKSVACSPKKAVRDPKTGKAVQERNSYAVSVWKRVKAKLEGRDVDPNRRMSVAEQVDYVIKEATNLDNLAQLYEGWTAWV

SEQ ID NO: 196 - DNA, 4369 bp, Homo sapiens
gcggcgggcggagccgggaggcggggaagcagtggccgtgtgagcgtgaggagctgccgccaccgcctgctcctcgtcgtcctcgtcctccggggccccggcgacgtgggccgcgcacggccctggaaaagacgtcgcctccccttcatccgcctctctctcaccgcgccgctcccgcctcctcgtcctgcgctgcgggctcaggcggaacccggaacggccgtcctcttcccccgccctccgccgcctcctccttctcctccttctcggcttcctcctcagccccgggccggagcggggtgtcggcggcggccggttcgggcggcggcgcttggccatgtcgtgtcggggaaggtaatgagccgcagagccccggggtctcggctgagcagcggcggcggcggcggcggcaccaagtatccgcggagctggaatgactggcaacccagaactgatagtgcatcagccgacccagataatttaaaatattcttcatccagagatagaggtggttcttcctcttatggactgcaaccttcaaattcagctgtggtgtctcggcaaaggcacgatgataccagagtccacgctgacatacagaatgacgaaaaggagagatcgatgtcttattctgatgagtctcgactgtcgaatcttcttcggaggatcacccgggaagacgacagagaccgaagattggctactgtaaagcagttgaaagaatttattcagcaaccagaaaataagctggtactagttaaacaattggataatatcttggctgctgtacatgacgtgcttaatgaaagtagcaaattgcttcaggagttgagacaggagggagcttgctgtctcggccttctttgtgcttctctgagctatgaggctgagaagatcttcaagtggatttttagcaaatttagctcatctgcaaaagatgaagttaaactcctctacttatgtgccacctacaaagcactagagactgtaggagaaaagaaagccttttcatctgtaatgcagcttgtaatgaccagcctgcagtctattcttgaaaatgtggatacaccagaattgctttgtaaatgtgttaagtgcattcttttggtggctcgatgttaccctcatattttcagcactaattttagggatacagttgatatattagttggatggcatatagatcatactcagaaaccttcgctcacgcagcaggtatctgggtggttgcagagtttggagccattttgggtagctgatcttgcattttctactactcttcttggtcagtttctggaagacatggaagcatatgctgaggacctcagccatgtggcctctggggaatcagtggatgaagatgtccctcctccatcagtgtcattaccaaagctggctgcacttctccgggtatttagtactgtggtgaggagcattggggaacgcttcagcccaattcggggtcctccaattactgaggcatatgtaacagatgttctgtacagagtaatgagatgtgtgacggctgcaaaccaggtgtttttttctgaggctgtgttgacagctgctaatgagtgtgttggtgttttgctcggcagcttggatcctagcatgactatacattgtgacatggtcattacatatggattagaccaactggagaattgccagacttgtggtaccgattatatcatctcagtcttgaatttactcacgctgattgttgaacagataaatacgaaactgccatcatcatttgtagaaaaactgtttataccatcatctaaactactattcttgcgttatcataaagaaaaagaggttgttgctgtagcccatgctgtttatcaagcagtgctcagcttgaagaatattcctgttttggagactgcctataagttaatattgggagaaatgacttgtgccctaaacaacctcctacacagtctacaacttcctgaggcctgttctgaaataaaacatgaggcttttaagaatcatgtgttcaatgtagacaatgcaaaatttgtagttatatttgacctcagtgccctgactacaattggaaatgccaaaaactcactaataggggtgagtctttaattgtaatgactttgttttatccacagttaagccttttctcattacatatttatgtatttcactgtcatgtcaagatgtctgcagaatcactgtgtgtaacaaacagccatatttaagacatgcctggataaataaaattggtaggaatgttttcttggcattatatttaacttttcttcttctttttccttgacaaatcttgataagtttttttatattagttttattttctagaaaatgtcttatgaatttctcctatttgctctagcatgcttatagaaaatgtcagtgtttcttacagctcaaatttgtgtagttgttttaaaatgcggtctctttcttcttcccctggtacttttttctttctgtctactgaagttagttcttatacatggtcttatattttggctgtctcttttccctaggaacattcatacaggttgaatattccttatctgaaatacttgggactggaagtgttttggattttggattttggaatactttttttttttttttggagatggggttttactcttgttgcccaggctggagtgcaatggcgcgatcttggctcgctgcaacctccgcctcccgggtacaagcgattctcctgtttcagcctcccaggtagctcggattacaggcatgcaccaccatgcctggctaatttttttgtatttagtagagatgggttttcaccatgttagccgggctggttgtgaactcctgacctcaggtgatccacctgccttggcctcccaaaatgctgggattacaggtgggcaccaccatgcccagccggattttggagtattttcataacacttactggtgagcatccctaatctgaaaatcctaaatctaaaatgctccaaaatttgaaactttttgagcaccagtatgatgccccaagtggaaaatcccacacctgatctcatgtgatgagtccaaactgttgtatgcacaaaattatttaaaatattgcataaaatgaccttcaggctatgaatagaaggtgtctatgaaacataagtgaatttcgtgtttagacttgggtcccatcctccacatatctcattttatatatatgcaagtattctcaaatccaaaaatatacaaagtctgaaacacttctggtcccaagcattatgaatgagggatactcaacccgtagtctttcttttaggggaaaaaaaaaaaaaaggcttttttttttttttttttgagacagagtcatgctgttgtcgcctgggctggagtgcagtggtgcaatctcggctcactgccacctctgcctcccgggttccagcaattctcctgcctcagcctcctgagcagctgagattacagacacctaccactacgacgggctaatttttgtatttttagtagagacttggtttcaccatgttggccaggctggtctcaaactcctgacctcaggtgatccacccgcctcagcctcccaaagtgctggaattacaggcgtgagccaccgcgcccagcctgcttttttttttttttttttttaagtaattcgacatggccctgctcttgatttgtatttattgtttatggtttgtgtatttcttcttcctattggaccacacagagttgaaaaacattctttttaatagaaagtaataggtgtgggctgggcacggttgctgacacctgtaaacccagcactctgggaggccaagtcgggctgatcacttgtggtcaggagtttgagaccagcctggccaacatggtgaaacctcgcctctactaaaaatagaaaaattagccaggggtggtggtgcacacctgtaatcctagctactttggaggctaagttgggagaattgcttgaacccaggaagtggaggttgcagtgagctgagatcacaccactgcactccagtctgggcgacagaaccagactctgtctcaaaagaaaaaaaacacaaagaaagaaagtaatggacataattagggaataaagtttttaggaggaaaaaggtaaaacttgatgtttgcgcttacatgtgctctgggttgtttgattggattgccttgtataattccatagctgcttcgcttattaccagttacagcttatgtttgaagtcacaataaattcttcttcgaacacgaaagcttgatttttgaggaattcacattatttacagattcagagatgtttatgtcctgtactctagaaataaggagaaagtgggtggggatggggcagtcaggtggaatggagtgtcttggcagt

SEQ ID NO: 197 - protein, 579 aa, Homo sapiens
MSRRAPGSRLSSGGGGGGTKYPRSWNDWQPRTDSASADPDNLKYSSSRDRGGSSSYGLQPSNSAVVSRQRHDDTRVHADIQNDEKERSMSYSDESRLSNLLRRITREDDRDRRLATVKQLKEFIQQPENKLVLVKQLDNILAAVHDVLNESSKLLQELRQEGACCLGLLCASLSYEAEKIFKWIFSKFSSSAKDEVKLLYLCATYKALETVGEKKAFSSVMQLVMTSLQSINVDTPELLCKCVKCILLVARCYPHIFSTNFRDTVDILVGWHIDHTQKPSLTQQVSGWLQSLEPFWVADLAFSTTLLGQFLEDMEAYAEDLSHVASGESVDEDVPPPSVSLPKLAALLRVFSTVVRSIGERFSPIRGPPITEAYVTDVLYRVMRCVTAANQVFFSEAVLTAANECVGVLLGSLDPSMTIHCDMVITYGLDQLENCQTCGTDYIISVLNLLTLIVEQINTKLPSSFVEKLFIPSSKLLFLRYHKEKEVVAVAHAVYQAVLSLKNIPVLETAYKLILGEMTCALNNLLHSLQLPEACSEIKHEAFKNHVFNVDNAKFVVIFDLSALTTIGNAKNSLIGVSL

SEQ ID NO: 198 - DNA, 479237 bp, Mus musculus
  misc_feature (1)...(479237): n = A,T,C or G
gcggggcgcggcggggaggcgggagggcgccaggaccaggcgaccgccctgttcttgcgtggagacccaaaggaaccaggaggaccagaagggacggaacccagctgtggactgtgtagggagaggggcggagctcggaccgagtggcagggacgcggctgcggcccgaggggcgggggctgcgagctgccaacgggtggagtcggggtccccatcgcgtctcagcgcagcacatctccgccagtctgctccgtgacccggcgtccaggagcagagcagaaccgccgggaccgtccgttgttggatcccggggcaccggggatcgttcttcgtcaggtagggtcggcggcagggtgtctcatgtagggaacttggagaatccgaggttccgggtcctgtagcatgaagggaccacgcagggtcgccagcgcttgtcccagctgctgtagtgagcgctggacaggcatggggcgtggggcatgaggagtggtgaagcggtttctaattcctttccagcaaggaccctgccacctttgggatgtgggaaaggaggccaagaccagaatctttcttagaactctggatttaaccacaaggaggcaaatttggcaatttgtagaaagaaacctctagttgccatgggagatgtggcgctgtcacctatgcaaaggctcccgggcgatgggatgcacttcttcctcttctctggggatggaaatgagacttgggagaacaaagatgatgctggcaagagcttgccagctggcgcctcttgcacatatccctctgacccttggcctcaacctcccattgtcttaaggccagggacaaagtgaggggcaggtcaggacttacagctctgtgcgtcccaggaccacaaaggctgcctttcctttcttaaacacctcgataggcagaagccctccttttaactagtctcttggacaccttcaacatcttctgaaaggaaatagtgattttcagagacctggccagctatctgtgccttttcctcacttgtggctcagaatggatttggggtcagtgtgttaagactttgtgttcaacacttgtcacctgaagggactattgatcactttagaagccatcaaaaagccaggtcaagcaagacctggctgttctgtgctcgccacaaaaaggacggtgtaaggaccagtctttaccctcatgtatgtgcaaggtgcgagcgcgcgcgcgcgcgcgcgtgtgtgtgtgtgtgtgtgtgtgtgtgtgtacacaggcacgcacgcacgcatgcatgcacgcacacatgcatgcacgtgtcatgtgtttctgagacgctttaagtaggactttctttgagagtcatgggaagtctctggtgtcctgccaggatgacagttgtcccacattactgccagggtctgtgatgctcttgtcaccctgtcatgcctgtcctgaaacatttagtttagaatcagggtaggcatcaaagtcacccatgagatcttggaatgaaagccaggctcaggagggacctctgcaggttccttacagagccagagttgcttcaagtttgctcttggtatatttaaagggttcagttgttaatattacagaggtaccagtgatggacagttaactttaacatttctatggtgagtgaagggggagacgaatgtgagcccacaagacttatatttggtggattttgtggcagccagaatacatgccagtgctctgtagaaagaattaataccattaacatcatttagaatgtaatatttgtttactaaaggaataattactttaatcgaaagtgtcatctcgagagcccagtgcaatggttaagttcatctgtgtcctgagagaagtgggacagctgtgacagaaagagcctatgtgctccgtgcacactaacacagctgaagcgtcttgtgtttgcactttgttctgtaaagacaccctttccccacagtctgggaatgtgtcaagacagatactccagggcctgcaacaccaagtcgttaatatgatctgtgggcaattccatattgtacagatgaaagggaatgtctatggaacgggagccctctgtggggcacaggccttcagcagggcaggaatggtctcgaaggagactgaacaaaaatgggaacacgtctgaaggaaaagttgccatgtcctgccacatccaggcccagaattcacatggaactcaaatatgtgcatgggtgtgtgcatgtatgcatatgtgtgtgtttctgtacatacatagcttgcagagagtgagtgtgcaaaaataatcagatacacgtgtgaggaaattgcaccagatttcagctatctgaaggaagaatagtatttcttttagagtctgtgctctgctgagcacctcgaccaggtgtctgccctttgcaggtggcatcacagaagggaatgtgagccagtgacagacaatatgtatgaaggaatcctgaaagtgatggtctcaggctcctactactatccaggaagcatctaatactcagaggacttgggcagtttcgtttatttgttttgtttttaattaccagctagatgtgtgtggatgtactgagtcccactgttgccctctgcctggtgtattagagctgtgggaaatgggaggggcttaatgacatgatcaggaggacaaagcagcagggcaggaatcctgcttgagtggaatgggacattgctcactcacctcctctgtcctcaggcatccttctggccacttcctttttatacattctggcctgtatttggcacgactcattttcttcacgatttccattgtgcttgatgtgaacttcaagagggcaaggtcatggcattgacataatccagcatacaatttgatcatgtgcattagcaaaaaatgccagatagtgaaagtgttttcagcaaaaatacaaggtgagaaggcagccacagggactgcccatcttccccaaaagagctgaagggctcttcacagggactcttcattctggtttgcctttctttcttggtcttcacagcacttgacccataaggcaggccaagggtagtcatcaatttcaggcttcccgattctagtctccagattccgtgcccactccctttgtagacttctgccagggacaatgagacactctgttggggctgtgagaagtgacatgaacatcactttctgtttcctttctcagtatctttcacttctatggctccctgtaggagctaagtggtatgggaaaagcattgtcttgtatgtgtcctgtccccaaggctgctttgccttcctggcctcccaggctgccctgaaaactgctccctcagaaggatctcattggctaatcaacttgtttctatctaccacaggcaaattcaaggaactgagccaacagtgctctgtgagcagcatgaggccataagaatcttactacctacttttcaacctgtcacatctttggaagtgtgctgtgacagctttaaaagtgacatgcatgggtatctgtatcatgtcaatcaagagtggacttttgatggttctattttatggttagcttgcctggattgtgaaactcataaaatgtgttggtgaggccatcttaaggcaaagacccatcctgcatgagggcaccaccatcacacaggctgggtgcttgcaccgaggaaaaccagaaaaattagaaagtcaattgagtactggtttctctttctagtgcttcctggtatgcacaaccagggaccacatactacagtgccatccccagccagaaactccatagtttcttcagactgggagtccaagtgataaacctcttctctcttaagttgcttcttgtctggtgtggtcacagtgatgaaaaactagttaatacatgataagcaactgaagcattcactagcttgagtttgaaaagaataccgtacagatttcatgtagagttcaggtgctccttgcttgcaactctaggttccctcatggttcctaggaagaacagaactcttcctagccactcaggtcctgcagctcagggtctgaggctaagacacaattatctctgggccacttttcctgcgagttgtcctttgaaacccgttgagtctgggaatgtgattctggtgactccttccagctggagtcatctctgtctcctacataagagcctataaggattttcttagatagtaattcttgttagtatggtaaccaggaaaacttgacaatacattaattctgagaatgtttagatttatattatctaatggtagcctgaagtgattatatacaacatggtattttcaaatacgttgttatcgtccagtgccaagctaatattgtgatttctccaaggcctttcccctccctctccccctatgtccctgttatnnnnnnnnnnnnnnnnnnnnnnnnnnnnnnnnnnnnnnnnnnnnnnnnnnnnnnnnnnnnnnnnnnnnnnnnnnnnnnnnnnnnnnnnnnnnnnnnnnnnnnnnnnnnnnnnnnnnnnnnnnnnnnnnnnnnnnnnnnnnnnnnnnnnnnnnnnnnnnnnnnnntccccacccccacccccaccccatctccctcccaccttctcctcgatcatcccttcttttgtcttgtgaattaggagcttgtttctatatttagctaggtatatgatacctagctaaaatatcacacgcatacacacacacgcacacgcacacgcacacgcacacacacacacacacacacacacacacacggcattttgacatgcatgccattttgttaactatttgcagcagactgacatggcctttgtcagttctacagatttcacccctcaataccctgctacccacctttctgtaccctgcaccccacccttgtctcaggttggctttgtgaactatcttcatttttccctccaccaccccctcttcttgttaccctcatcacccccttgccaccctgttcccaagcactccatggccctaactgaagcctgacttcaggccatgactcttttttatcttcagctaggacacctttcctggatggtacagctcctgctttctaatatgcaaacctgctctccctggcaaggcactctctgtctctgagccgagtctgtggtactgtcctgtgttgcccacagttctctcatttatgggctctgttcccctcccctgcttactatttcccatcagtcatcggatccccaccgtttacctcatgaatatttcccatcagtcactgggtctccaccgtttatctcatgaatatagctcagattactttcccctattctgaccttctctggcagcccaggtccaggcttcatcatgttgccagggctcaggaaccaggccctcatccatcttcctgctttgcccttcccctcggagtcaggcttactgttgccagagtgatttgtcttaaatgcaaatttggccatgagaccacttgctgaaggatacagcggtttcttgttgcccacggtgtagactgcaggcccctctgagtcacagagtatatcactcatccagaccacaaagctgttctccaagggctgttctccatgtagaccttagcattggttatcccattggtactcagtctctcacaggctgggtatgagcctcttttaacagtgtgcagcagaatcctgctgaacacatgttcaaaacccccagcgccaccatacattcctgtcctgaggtctacatagtgcaatataacatagcccaaagaatgtgtggataccgactctataacccaagagcttgaagtattgctatctggcccctttacaggataatttacattgaggatgatttacttggatagtgacagatagttgaaagaagagaacaaactggacatataagaagtcagtcatggggctggggagatgtctcagtggttaagaactccagctgttcttccagaggacctgagtccagttcctggcacccacactggtagctcacaacaacctatatctatctccattccaggggtccaacatcctcttctgggccccatgggtacacacacacacacatacacagacagacacacatgccatgtactcatatagacaggcataaatgaaattaaaatgagtatattttaagtaaaccatagattgactgaattgaaagggggaaaaagactatgtccaaatatttgatgccatatccattattcagattttaagtcttataatttatccataaatagttaaccataaatccatgattactgtattcagtacaagaaaattcaatacttatatcacataaatatccctgtgagcatttgttgttaaaatatatagttgagggaggggaaggggataggggactttcagagaggaaactaggaaaggggataacatttgaaatgtaaataaagaaaatatctaataaaaaataaaaataaaacaactatatatatatatatatatatgtttgaagggctagagagacggctcagcagttcagagagcacttgttgctcttccagagggccaaagttaaagacccagcacctatatggggtggctcacagccacctataactccatcttcaggggatcttatgccctctggcctttcagggcccccgcacatgcgtataaatgcacacacataaataaaacaaatctttgaaaaggtatgcttgcaggtgcatcaggatgagttcaaagtttaaagtggattatgatgtgtaaaattcagctttgaagtcattttatttatttatttatttattttagaaatagcatattgaaagtattttaatttcataggtttctgttctaaaaatgaatctggaagtcataaccttcgggtatgtatagtataaacacacacatgcaaataaatcttttaaagaaatgtgcttgggggtatgtatcaggagtttacagttcaagttttaatatgctaaattgaattattatatataaaaatcagccatgaactcattctcatttctctagaaagaacatatcagaagcattttaatttcatttttattatcagaattggctcctgttttgaaatgaatctgaaggttgcagcccctggtacatgtgactctctgtgcctttagcgggcacctctgaaacattcaatcattcctgtaagaagaataagttctcacttggtccctcatttcctttccaatttagattctcagttattagcatcccagtgctgtgtgactgggaatccttggttagagatagccctctggactcctgaatcctgctttaaaatgtctattaatattcctttttatcttttttatttagtaaacagaaactcacttcggtgatttgaaacttagtggaagataaaaggaatacagctcaagaaagaaagatgcatgtagtcattgcactgtgcagaagcaactaatagggtctggagttaactaagatctgcatcttctcccagaggcagtttgctaaggcagtggatgaactctgacagggatgctacctgggcttgtctcagtgtcagttatagcaatggccccaggcaggcaagagtcaccgtatatttttgaggagggtgttcctcctgtcaaaaggaaatgcagggacaaagagtggagcagagactgaaggaaaggccatccagagactgccccacctagggatccattccatctgtagacaccaaactaagacattattgttgatgctaagaagcgcttgctgacagtatcttggtatagctgttccctcagaggctcgggcagaacctgaccaatacagatgcgaatgtctgccgccaaacatcagactgagcatggggccccaatggaagagttagggggaaggactgaaggagctgaaggagtttacaaccccataggaagaacaacaatatcaaccaaccagtcccccacagctcccagagactaaaccaccaaccacagagtacacatggaaagacccatggctccagctggatatgtagcagaggatggccttatctggcatcaatgggaggggagccccttagtcctccagaggcttgatgacccagggtaggggaaagctaggacgctgaggtaggagtggatgggagggtgggggagtggataggcaagtgtgtaggggaaactgggaagggggataacatttaaaatgtaaataaataaaataaccaataaaatatgtaaaaaaagagccactgtgtaacataatccataaagggacaagcctgagtagggaaaggcttgagatgcaggtctctgagaggacagaaatccaggacaaccttcttagtccttgtcagcccagcaggacaggcaccggactttgtaggattaaatgcaggatttaatggaacaaaatattcaggcctctcacccatccagagatctggaggccttaacttttgtacagctgtcatggagaagacaacctatcacttgcgctcccctccctctgttttttttctgaatgtttcggccattctgcaaaagtctggggattcacaaagtctgagctatcttctgaatagctaaaatggctaaatgaaaataatgaaaaggaagtactgtaacaggcatgagtctgttcaataataggaacttagtggtgacgggtatgtagtatgagtattagggaaagtggttccccatctcagtttgtgttgagggttttgaaatgtcaagagagataattatagaatcacaagtggaaactgtaaaatcagataggacgtgaatagcctgggaggctctcaaaaaccaagcggtcacttcacagtcacctatcatgtcaggagaaagcaagagaaataactagagatgccacccactctccagagggcacttatgaaatgacatttatccaggaactgctgagacaaaacacccaattcttttgctacgatccccagccagtggttggctcctctctgcttgccgcaaacaggatgaagagatgagttgaagttgaatgccatatgaccacgatgagatgcccctgtgttaggacaccctcgggttatgcctccctcagaactaaaattggggatctaggataatgcaagtctgaagtttttatgtctggtgcattcctgagagagttttgttgatttggggattattactgctgataagctaaccttgtacatatacaagcatctctctgagttccctaatctgctcactgtatgtttctgccccgctccaatgcttcaattcctgtagcttttaatgtgtcatctaatcaggatgtgtgacgtctgtagcattttagctttgttcctttttgtaaccatcatttttgggactcggggtcctttaggattccacataaactctagagcatcgttttctgtttctacaacacctctggtgttctgagtgggattattctgcctgtgggggtctcactgagtagcatggacatgtcagagatcctcccaatccatgaacatagactgtctttcccacgcttacttttaatgttttattagtgtatagtaactagatataacagtaggctcttttgtaatattttcatatatgtactgttgtatgttttggtaatattcaccctccacttgccccttacccctcctcatctcacggatcgccttcttgtccctcctccactccctcatcccagctagtcctcctgctttcctacctgtgtgtatgtgtgagtgagacacactgagttcaccaagttttcttacaggagcatgggacagggactcattaacagtagcaagttcatttttatcagtgagcaaaatatatctcccgcctccatcagccattgattgcacataacattttacaggagagtgtggacccaagagcctttccttcttccacaggacagggttgatggccaatttggagaaagcagagctactgtggcctcaagagtccaccacccatatcagagtggaagtcagtattccatgttcccctccacacacccctgctctgcttcctgcattctttccaccccttttgcttgatgtcccccaagccttggaagaaatatggtggatgtcctatttgtggctgagcacaaatctttgattgtatgaactatatactattaactatcctaaagtgtttccttttaaatattattataatgaaatcatgatttacacaaaattggaacaaagtaatgacacaggctgactgactgaatgaagaaatggaatccacctacctatctgttgtctacaagaaacactgctctaagggtactgtgttagcataaaggggttagcaaaaggactccaatcaaatggggccaggaagcaagcaggcaggcatccctaccccactacttgatagaacagagttcaaactaatactaattagaagggataaagagggactcttcattctaatcacaggaaccattaaccaagaagtcatcactgtactaaacatatatatgcactgaactttgatgtacccaatttcatgaaaaataacctatacaaacaaacagcccgtactgctggatttaaagagagatgaccatcagtccactcaatctacatagtagatgatttccgtacccattttatccaatagcatttctagtaagacagctttgatgtgaattgtgctgctgggtttgtcgagtttcttaaatttgaatgtgcagctcctcaggtctgggtcacttgtagccatgatctcctcacatcacctctctgccatctctcagtttctctaactggggaactctgagatgcccacagtgcatgtatattcacccaccatccaggagcgtcataagtgaccctacatgcctttcacttttgtgcttgtttttgctgttctaaatcaatttagatggaatgaattaattcttttttcttgcttgacttatctgtgctaaacccttcttgtgatattttattaaggtattcaattctttattttttaaggtattatattctgtttttctcttataatttatttttatttgttgacattctcttcttttcatgcattctgtttgtttttttttttaattgcaagtttgtgttctatttaagatctttgagctgtgttatgctgactcttgtattgtctgttgggtcactaaatgatatctacttctgtggagttgtctctagacagtaatcttacacacttgtttgggccttgagtcccctgcttttatgcataccttgagacacattttcattttcgtgagacttgggtatctgagaaattagccaacattttcagtctttgcaggctgactcatttcaggcagagactatcacaggtgttctagcttctgagattgtaatttccacggatatgtctctatgttttctaagtcagtggctttcctgtttcctttttctggaaatatcatactcagactccctctagtgcctttctaagttctccacagttttcagctgctatcactgcaagccaagcatgtgttttgctctgaatgacactagtgattcagggcatggcacttgcattcgtacccaagggggtctactctgccacctcctgcttcagtagtataattttatgtgctggtgttcagtcagcttttaacaagatatttggcaaatgttccagaatgtcaaaattgaccttattaactgtagttaacattcaagtgcaggagatgctgggtaagaagagacggaggcaagctagttagttgcagagcaaaacatcaatgggccagcgtcactcttgagatcccaaagaccatcagcgttaaaacacacttggaaggacagacaaagaaatatggtcccttcaggggaagcacagcagaggactgattgagaccaaatcatgaagaatgaagagagtgtgaaataaagactcatctacacaccaagaagaacacagcacaggatgcagggaaagactgcagccatgaagataacaggatgaaagtgccttccattgctgtgataacaccatgactaaagaaacttatagagccaagtttatttgtattatgggtccagagaattaaggctcacatggtgtggatggcacggcggcaggtagcaaacgtgtcaggtgtacctgaaaactaatggctgagggctcatatctggaagtgaaaagcacaaaggagaggtggggagctgcgaattgcaagaggctttgaaacttctaagaccatccatccctgaaacctacatccccagtggtgtgcttttctagcctagctgtgcctcctaaccctctgtagccactgccattaagtggggccaagtagtccagtgtctaagcttacagaaggacagtcaagctatcacagtagtagtgtgtttagtgcaataatacaaagcacaataatgcaaaggatggatggaccaaaaaaggggggtggggcacatagtgcttcagggctgctgggctgtggatatctacacttctatactttggatatctatatatttttatttctatactttgtatatctatacattcagtgctgtgcacgtggcagggtgcagacgttctctgtgtgtgcacacaggggaggcaagatcctggtttgtcacacaactttcccatgatgtggtagcaacatggtttgggtgaaactgatctgactcagcctccaggagtcggtggtatttggctgaagttgatccacattcagtgcccactggagaatttactccctacaagatgaagcatagtttgaaacctgaaatgtttgtgggttgcagaaggattgtcacaactattccttatacttaaccttagttatttttgaaaatttattaatttaaagtgtgtgtgtgtgtgtgtgtgtgtgtgtgtgtgtgtgtcatggtacacatctagaagtcagaagacaattatttgggaattgcttttctccctctaccgtgtgggttccagggaccacacacacatgtggtcaggcttagtagcaagtgtctttacccacggattccctcaaacatctttaatgaagactagaaagccatagagaagataaatactccatgagtgaatcccagcagcattgggatcacgttatagcaggttatgctaagatagaattttatgagcaacatctgccacctctgaacattgtggtttattttttccagtgtgaggatacagtgctcgtaactgaaactgtggaggactgttgcatgggtgtcggtcattcatgtccgaatgactctgttcttgggcatatgccagaagatatttctcttttactgcttctgggcattgagggctgtgtctgtgatgtggtatgcatcatgtccaggtctgccttcgcttcttggtagagaggtataaaaaattctacatggagtgtacccagccaaggagagcaccctagaaatgaacatgctaaatgaattaacactgagaaagttgaaattttaggccaacggaggtaatttatcaggaagacttgtcacctgcagctgatgctttcaaaatactaatagtacaaatgtaaaatgtcaaagacccatcttgatgagagaacacgtggacactcagcacagtgagccacagagcattacacatacagaactcacagacagtccgtagacatcaggggtcagggcctcacagccccactgatgagtcaatatttatacacatacatttgtcttggagaatcacaaaaaaactaatgatgtttcaaaatggaatatattcagtgaaaatatactagaattgttaaggtcccaatcagaagtgtgtgaagtttttcctggaaaggtttctaccagagaggtgtggagagaaggtgtctttcatgtagagaaatgatcatgccttgtttcatgcttactatggagttgacattggatgagtgggttgggtagagttgggttcgaaatattatattaaagtgtgggggtttttttgtttttttgtttttttgtttttttttttttttgctttttttggtagctcatcagtaaatgtaaattttaccttaagaattccaaataaagagaaaaacgatcatatcctctgtgtagtgtgtcctcaaggaaccaaccaacaggaaagatacttccctggatgtgtgagattctgaatttagatggcatctcagtccatctccctttctcaggagatgagagcagttcaaggtcttcaacagggaaatcccaggatctttcaactgctctgctcacagcattttcctccgtgaacagcgaagcatgtcttactcctaaattacagcttccacttacatgtgcggtgtggcttagacagtcatccctgccttccacgcagataattgctacttgtgaaagggataaagtcaaacaaggaaaaagtgagcgcagactcttaaaaaggagccatgccaaagccacaggctagggtaacccttgaggtcacagctccttcggggttttgttacttcactggtgtggggcagaggctaccatgttgatgctcaatacgacctggaagcagacctggatggcagtgtatttaattgtctgaattccagatggtttaagaattcagctattatccttgagaattaaaaatctctgttagggcaaggggaaaggaatgcatacacaatttgtaatgtgcttgaaatcaatgtcagggagagagagagagagagagagagagagagagagagagagagagagagagactcctagcttcaagcatttgtgaacaacaatgggaaggaagtgtttcgaacagaaagcagaacctagcagagcctcctcctgttgagatatgctcatacttcaggaaactgaggcaatggatgtctcaagtccctgtcccccactgtcattctgacagaagctggaagcccagattccacacaggtgagtgcagggtatcttaggcagcaaggcagaggccagcagcagtttgtagcaagcagtggtggtgtggagaagccagcactctgtggagtgaacccgctccataaaagcataagaggagggcgactcctccgttgtgtagaaatcagagcctcnnnnnnnnnnnnnnnnnnnnnnnnnnnnnnnnnnnnnnnnnnnnnnnnnnnnnnnnnnnnnnnnnnnnnnnnnnnnnnnnnnnnnnnnnnnnnnnnnnnnnnnnnnnnnnnnnnnnnnnnnnnnnnnnnnnnnnnnnnnnnnnnnnnnnnnnnnnnnnnnnnnnnnnnnnnnnnnnnnnnnnnnacacacacacacacacacactcacacacacacatacacacacacacacacacacacacacacacacacacacacaccaacgcacaccccgcttctgcctcttcctcttttcctctccactctgcttctgcctctttctcttctccctctctggtccctttattgatgagtcttgtcttccatgttaatcatattttccagttcttctctacaattgtaaaattgaatgcatacacacatgagttgctcaagtgtacctcacatctaaatctaaacaacatgaaatgggggaaagaggctaagatatgaaacatgtagaatgcacatttcaggggaagcgtcatatatagccaagtctaagtactgctgtcagagttcacaaatctgtcttaagaatggatgttacagaacaggaggactctctagagtccagaataaaagtgctggggaaccaggggtctggcttctgtttgccagtcattatataaaaaacgaaaacacgaggcacaaagttgtgtgcacacagggcttcagaggaggacttctgcaccttctgcattaccctctgccttgtatccttgggacagggtctcccgctgagccagggacaagcagtttagccccatgagctcctgtcatccacctgactctccctcccagtgcttgtccctaactaaatactcatgagagatgaatatagtcacccaaacaagacatgaacagtgaccgtgtttgacatgccagtgcaaatgagggaactctcataaggcttcagccctacctagatgaggggccactggctatcactggctgcccagagggagaatgtcttcttcagggatgctccttagaggtgacttgatctcaagtggtcagtgtctaaacacatgtacatacatgtaagcagactcagtaggttatacatacctacatatatatcatattagtcatacacatatgttcaacagtgaagaacaggctatgcacttgagacagggaacacagggaaaaattaatggagaagggggaggcatagaaatgatgtcaatgcagtattcatgtagaaaaccttcataaagcacgtaaaaatagtttccaggattgactctctggattggccttgttgtagcctgcttttggtccacttctgcttttgtgtgtggcctgaccaagtcacttcctactgtgtgatggtctggtgtctggaggtcagtgtgtctgagctgcttcagccgtggtgagagtcaaatgatgcatgtgatgtattgacacctgtcacaggtttccaggtacgcatgagtggcaatcaccctctcactgtgggtcactttacatgaaagaaatctcatttaaattccaggacaaaatgtaaaggaatcgtgcccttccttatttggattttagagattatttttgaggtctccattgtgaacctggagtttcttatattttaagaacttgtcagaaaaacttctcatttggaggaagaagtagatttttggaattagaaaattagggcatattgatcccaattggtatttgtcagagagaaaattagctagtaaaatccattgacaatctgaaacgttttcacaattcatttaacagtgatggagatttaagttctcgtctgtcttgggtatatttaaatcaataaacgtttagctctctgcagtacggttacatacaatttgaaagcatagaagggaaattgcctcccattcatggaggagaaagcctgcattcactctcagggacaaggctgtggcagtggtggtttgggaccacctacctgtgtttctctttcccagtggttttctgactctctgccctctgctgtcagccagttgggagtccaccttggttacattttcgatgtaacacatagatttttctgtattttcttcctccaccctccctctctgctctactcttctttctctctctctctctctctctctctctctctctctctctctctctctctctctcttgatcccaattccttatttggcttcctgttttctactttaatccttcctgtcaaaagtatccagagagctatcacgctgagagatagtcatgtgttgattggtcctccatatctcagtctaactgggaaggaacagattccttcccagtgaaacaaacagtaaggcagttggggtccagccgatgggtgagcatctgctctgggaagtgcagaggacaggacatcaatgtcagagacacagaagggagacttttgagaccagaacagggaggtggtttctgagagacaccgaaaggaaggacatagctcatttgtatggctgctacatagagattctataagacttagtactttattgacgtttctttttgtaaatttatgttgggagacaagcagagcaaatgattggaacttttaaattggatttcaacttcttttaattatctaccaatttctatttgcaacacagttatctgctacacaagtcttctttcttgatccctttggctgcagacataaatgcctgtaatacaaacatcttaggtgtctgcttgctacttaatacttaaccccctcaccttctgtgcagctggcaagaatacagtagcactcacactgaaaactgccttctgtgtgcctgacaatacgcccttggacctggcatgtggaacctaagtcattttccttataaatgtaattatagttaatgatctgttttgtaaatacaatggcttttcctttctctgggctgaatttaaatgtgaaaataattaggaaaataagtgtgaactttgcacatctcggagatgttcctattattatgcatattttatactttgttctaaatttgcatttatttccttacaaaaggtctcagatttacttagatgtgtgtaaacattcactaaagacacaggaatctttttactttgcattttcttgatctttcttctcattagatgtttctagtgtaatagatagttattaattattttccaaatataaaagcaaattgaagtgaagcgataagacctaagcacagtcagtattttaacaatgtcctgatattctggaatgggcaaccattttcttttttcttggagatagggtctcactatgtaactctggctgtcctggaactcactgtgtagaccaggctggcctcaaactcacagagatcacctgcctttcaaatgctggcattaaaggcgtgcaccatcatgcctagttagaatggggagatttggactggtgagatggctcagcgggtaagagcaccgactgctcttccaaaggtcatgagttcaaatcccagcaaccatatggtggatcacaaccatccctaacaagatctgactcccttttctggagtgtctgaagacagctacagtgtaggtacatataataataaataaatcttttaaaaaaaaaaagaatggggagatttttaagaggctgtgatgcaggccaggactggctgagcatgctgtatgtccccaagtccctcccttttcagaaagcacagactcctgtgattgatgttacaacatcctacatgaacgctccaacatgtctgctcattctcacttcctaaattaatgaagaagtgatcatgtaatgataatgtcggtatctgcttcctgcccatatatggattttaaagtgtagtttagaaaagcctccagtttgcaaatggcataattcccagagatgccagagtctaggttttgtgactctgcgcatttccttgggacactgtgacagagctccatagcctgagagacttcaacaagccacatgtgtgatgtcacatctctgggtgttactgccaaactgaaggtgtgggcactcttggcttctactgcatggagtagtgacaagaatccgtctagccatgttccagtggcagttccactggcagatggattcttgtcactggactccattcttgtcttctggactccagctatgtcccagtgcctgccctacagcttttgggcagcttcttgtccaaatcattgcttctgggcatgtcagtcagtcagggaatatacatgcacatgcatgagtcactgtcctctgactgggatttctggatctcaccaggagccaggaacccatgttgtggtggctttcctgctcagctggttctagactcttgaaacaagccctcaaatccagttatgccaactatactgtcttggacatcaccaaaatttttagcaagcaaaaatcacaggaaacaagcctttgaaggcgacatattgtgcaaccttgtcttcatcctgggtgggcttgagggacacctatggagcacacagctgtggagctgggtcatgtgcacatcagatgattaacttagtaaggaggttttaaggataatcctaaaaacaaagcctgggtacttaggactctttgatcaaatgcattgtacctaaacttacgttattgagaaatttaattacgttactcttccacacactttctgggtgtcttgcctgagcaaacaataccatttcttttcataagcctggcaacacatgaggccccacgtctctccacactggagctccaagagggggctggggagggggctgcagaggccagctggtgagtgcagaattaattacagatcgctgctctcaaaagtgcagacatgggtgaccaccctcctccgatggcagtggcagctgtccctgcccttttaggtttctagtcacagggcagacacttcttccttttctttgggagcatatgtcgcgagctttgggatttggatcccagaagctcagatgctgagtctgtagaaaactgctgttgtctgaaggacccatcgcaggatttgttaattcaccaaatttgacatttatttatttattcatgtaaataagtacgtttcaaaaaagcagctagcttaaggtatgccccatgtgacttaaagcaggaagcttccagagagaatgtgattgatgcttcctattcgtattggatttgaggtggggagagagggcaagattcagatgcagccagaggactgctgtgttcagggtagcagtttttatgaagttggaaaagtggatttgataacttggcaataagattggcatgctagtcacctcaaaatacaactcacatattaatactctcgtaatatagtttgcatattagttccagtttctcactccacctacagtgcttgaactttggtgaaagcatctcattaatggatgtgctggataagctgtggatattctgttttatttctgcctctagtggtcactaagccccagagtctgctgtcaactccccctctagcatctttcttccatccccaggagaagctgagaaatgccagagtctgagctctgaagctgatgaacctcgggccttgaatcttactttcagcaaacactgttcttgtctgcttgctgacaaataaggtcaagttgttgaatttggatgaaatcacaaacccctgtgaggccacagatggcgagataattaccaagagactggtgcctgcaaccccactgcctttgacaaagtggctcatggctttcagcaagcaacacagctttccaagacaaacttctgcaaaagtagctttgcacagttagcatgtgcaaacaaggacttggaactatgtcactaaaaaccctcctggacttaaagaaaaacactgttttcagccttagcaaaccgggcgtttcacaaggtattcaagtttaattgataagacacaggtcaagtttagagtcagcttcattgtggtaacatttccccagtacctgtgtcccagctttcttttgttcagagtgcattgtgttgggtaagcacacactttgttcctcaggtaccctgatctctagcttgcaggtgtttgcttaatcaatcacagaaatccgtgcttataattccctatagatcccccttttaggaaccgtttcacctgtatcattgcaagcattcccagcagtttgggtgtctgcattgatctgtagtgagtggctgagtagccactgcatgggaagtggctttgctagccttcctgggcctacagtgcatacatgcccaagccatttctgtgaaagcaagctcttgcctgtcaggggtgtaggcaccgaagcagcactaacatgcctgccttctttagaagatattcttagctttctccttggctttccagcgctctatcttggcaggtgtgccaaggacagaacatcacttgctgcgacctctatgatgccctggcagcatgtgtctttggtgtgactccctcctggcagttgactttctggcctgttattccattatattgaacacatgggaaatcggtacctgcaggctacccatgagtccactgtcacaacaggctcacacagaagtaaagtttaacacttatgtgaaaccaacactcagtggactggggtgggatgtgcacttgttattcagagagatctctgatgatgcagggttttatcctaactgaaagcactgtaacagggatgaggatacacacacacacacacacacacacacacacacacacaccagggaacagactctgcactcaccagatggcacaacctggggctatttatggagatctgaggacagaatttggaacaacaaacagatacaatgccaagaaaaagtcaagacactaggacggtgaggaagtgagatgtttagctagcctgaaacaaatgtggcagggctgaagtgtgcgcccctgtgttaactaggaaatgcacagtccttgatgataatgctctgtggctggcagtgtcctctccttcccttgccctctctctattcccttcaactacattccacttctttgcccttcttacatcattctttttagcacacacatcttgtgtgtgtgcacacgtgcaagcatacatgcgcgtttgcatgtgctcatgcgtgtttgtgagcctgtgtggggatacccaaggttggtatccattgctctccactttagttactgaggtggactctctccctgcacccagagttcaccgattctatgtagtctagcgagtcagcatcacccagggatccccatcttgacctcctggatgttaggatttcagtggcttccacacttccttgatttttttaaagatctttaaatttttgtattatgtatgtgtgggtgggtgtgtgcaaactagtgctggtgtccatggaggtcagaggctctgtaggtgattgttagccacccaacctgagcgaagaaaccggagtgtggggcactgtgggagaagcgagaattctaaccatcgaaccatttcaccaacacagtctgcctgtatttacaggaatgttgtgtggcaagtacttttgtctgcctgtgccactctcagagttaaccttccaggcagggtcagaagttgtaagtcaggcagcagcctccctcccctgtaagctcctcccattcttttgtagtcaccaaattattcagaacacttgctccaggaaacccttctgttctgacccattccaacttcaaataatcccctggctctaaatactgagccctttcgccaagctctcctaatcctcagctgtcaaattgctgcccttaatatgtctcacaggtaggtttgctctggtctctgatgatccctggtttgaggtcactagattaatggggtgtgcagggagaaaggtggggtggacacaggttctttaggttccaacccccaagaggagcatgcaagccccgccccgttgactcagtttgcatagctcacacatttccatttgaagcctgttttgtagtaagctaaagtgttcctgtttggaagcacagggcatccagtaaggaagggacaccatctctgcgtagtcgtggacttgtgccccctccctcattaaaacagtagggaatcgaatcgtctctttgttcaccagaggtcacagtgtttactgtgaaagctgatggggtgtggatgggcttggggtgggatgcacaagggttgttttaggggtttaggggcttgtgtagggtatccttggggtctccctatgagcctatcacttgtggattgtgtaactggatgaggagagtaagttagcatagattccttttttttaagtctcattttgaataatgttctttaataattaatgctgatttgattaaccaccaaggctcacatatataattcagagggaatagtaagagcctggtctcactttcctttgttcaggtgacctggtctttgataacttcagtcaatggatgtccctcgactccatgtcacatgggtgtcctaaggtccactccttcgggtacagaacaagagccatcatttgttgagaaatgtttcttttctttcactgggtttttctttttcccactgattccctgccatgcccaagggatcagagcctctcttcccattccctgcaaccctcaaaggagctcagacctcaggcacctgggcacagcctggggctattgcagccctgacctttttaaggctttcttcctcatgcagaggccagtagctgaggaagcatggcctctcccgttcccaggtgcgaaatcagaagaatgggcaggaagaaagcagctaggaactgtagttgtgaatgtgggggaaaccattaaaagggaaggagacttaactataaaccaccaaaaaaagggcactgctgatttaaagctgggctgggctggcactgaagggcctagctatcatggcttttttttttaagtgaaatttgacctgagtatattatttgttttaatcataataatggaatgcaggcattttaaaaacagatatttgacctttccatgatttttccatgattttattcacatatatattctatatgaataatagatttcattatgaaattttcatgcagacatgtagtaatgtgtctggcacctcctgcatctccccaaattgtctcttttctacttttctgaccgagatcctgtgtacctataagacacatttgtcttcttgagtctggctcatttcagttaacaggggtgatttccagttctatccatttttttgaaataacatcatttcctcctcacattgcttttggccagagagcttatatcagccatagacaagcaggttaggaaagaatgttcccagagtgtctaaaggcttttatcaagaaaggaccctgaactctgtcaaataactttactgcatcgattcagatgatcatgccatttggtttccttattctattttgaatttattagattcacacagcctgaattacttttttttttttttttgtctctggaatgattctcacttgatcatagcatataatctcttatgtattctgatgaatttgcttggcgagaactttactcaagaattttgcattccaaatcctagagggaattggtctaccatttccttgtgtgtgtgttggcttttcagttttgtagccacagaatgagtttcgtagaattgcctaccttttctacagagcttttgttctttgatttcattgaaatgtctgatgggatttgaccttgaacacatctagccttgttttactttgttaggcaatgatcattgcttcaatcctgttgctgattggtcagttcaaattgtttatatcttggaataatttttatagccacacatgtctgaacatttatcactttcctccagatttcccaagtcagtggaatacattttttctcttcattccttaggatcttctggatctcactggtttctgctctaatgtttctctttttctctggattttgactgatttctgagggaaatcacaaaggggtatgcctcagagcttatgactcctagctgcccaaaggtggggttggtcatgcagaaaaccaatccatgatgttttctctgaggtttggaccatagagtcaaattccggatctagaaacttcagctcagtgtgcagcatgtatttacaagccatgctttgtaatgaagcttcagagacactcgggtgaatttggctctgtcatgcttggcaggtattccatgcatgcatgctgcggtgtagcatgtccttgaggagagagaatctccccagagttgtttctagtctgtgtgcttgcctcatggtcaacacaaccacttgtacaatacattccagtgagttttgtgagaacttaccagtcctcaccacaaagaggaatttaatcttgccatgctcagaattataccttgaacttatgtgaatccttcctatattggggcattggtgggagctgtggggtattggagtcaacctctagataattatctattagagtaccacccctgtcccctgtgccaaccaggtggcataaatggcaaaaatgatgaaggatgcatgtagagaatattttcagaattagaaacaacagaattgcagaatggcactttctgctagagagcatttagaggcatcaggttaggaaatgtattttgtgtcttaagtgaggcaaagatccagctcccagctatagcagtaacatgtgaaatctccatagtatccatcaaggtcatgtatgagggaagagaagggcaggggctgcagtagactagaccagcacatatatcctggagggagaattctctcgaaggagtgtcgtagatgtttctgatttgtttttctaagagagtgtatctgtgtttcctgtagtgttgtgagtgtttctggtttgcctttctaaaagagaatatttgtgagtgtgttccaatagtactaaaatgctttcagaatccagtaaataattgtagatgaaagataaaacattcattgaggtgatggatgactctgaaaaatgagggagacatataatcaagtccatttctcatgaagattcaaagctctttgtatgcagtaccatgtcaactttctaaccccagggtctttgccttgtctggtggctgcatagacagtgataagatgtgtctaatgaactaggtgtctcaccgaatagcgattaattaggaaaaaaaaagatttctatttgatatgacaatttattcattttaaattaattcatatttcattgaattaataattgcagtgaatgaaaaatgcagatgtccctccctagtggcttcatctgacaagagttcaatggaataggcacagtgctaggtaaacgagtccttgatctcattgcggtcctcactggagctcagcagagctaccctctgtccccgcttttgtacagttgtaaaagcagattttatatttgttcagataggctggtcactgagtatgttagaacactgatcactataatccacacacaggaacggaaacgctggctttgctgatcttaagccattcttcagtgttgctttttggctggggcatcctctcatttgtctgtcggatatttttgtgtctcaaaaaggtactttgtttcatggtatcagtaggaagttcagaaagtcagcttcaaacagaaccttatcttagcaacatcctttcagggaattctcagaagttaagttctgtcccttggatcactgtgtctatttcttattgaaagcagaaagagtcatgtggatttattcaacagcttccagaaggtgactgtcacatccacatgacactcattagcctcagaagagtcaccagcctcagagtattattttcttgcttgtgcttagacatgttaggcatctagtgtgctttgtcatgaaacaaagataaatctggaaaacaagtcatgctgtcctcagagtcccagatacctggagcgtcctcttcatgtccacatgtaagggactcagatcctcccatgagaaccagtcatttctcagctcctcttatgagtgttaaggggtcaatctagctgattctgcttccttctgggataagcagctgggattctcaagtctgcaccctcaaggtctcttggactgcaggcagcaaatgtccacatgggagtagaatggtggcaggcagtagttttccatgttattttatccgggtggggatggtgtgaatagaaagagaagctgctaaggagcaacagggctcaactctcttcatgtgcaatctttaagtgtagccttggaaacagcaaaaaccacccagatcacttggttgggcattaccaaggcttgcttttgcttttcttttctctactgtattgcacagtgctgggcttgcatggtgacctgtacccatgttggacctgtagcctcttactgacttcctatgatccatggttgttactttaggtctacagtgccacggaccaggcctaatcggccccccacaacccgtgggaatcaggggttcgaacagatgggcatagagtcggcaggaattgacagacagactcgatacaagggagtgtggatctgaatgtaatttgtcaaatcgagcatcaaactttttatacagaagaaaataggggagttgggtgtcacaccggcaaggtacaaagaggttactggattctaaaacaatggaatacaaacatggaagaactggcaggaaccaactggggtaaaactcaatattagccactgggatcaaaaacagctccacctaaggtccacttaatcttagaagccaggggcaagggctttgtgcccttgccatagttcctactctagtctattgtatagtcaccttccccttaggccgttataaatacttgtgaatgggtataactcagataagttctaagtatctactctggttcctctttaggtcgcaaacttccttcttcctagataatggtaaatttctgtgtggggcagtgtcttagctatccatgcccaaggtcggatcaaggacttcctagaatctaacttagctatatgtcaaaatatcaatccttaggagcacttgtaataaagcaatattaagggaaagcacacagatctgtttaccaactaaagtaagcacattggagcattctttatactacgggatgccacagttccaggagactaagtttccatgaacttttcgcctcaggacagcgcccatgttctcagggtctgtcgcgcttgtcactactggagtggatgtagcactacagagggctttgttttgctttgttcttgcattctacatgttctagatgagggagaagagtgaagactctcacacacccttttcagtattcccatcccctcccattctgcagactaggaattactgagaaacttcacgcagctgcaagagacaatgtgatatgtctcttacatggctgctgtcaagccaacactcaagagtttgctgatttactggagtttaagttgttgaggctgaaattatgctactgaagagtttctctctaagaattatagtaactgtcttccttagaagcactttcaagagacccttgagacatcctggtttgctgctgaagttccctcatagaaggagcccagggtaggattactggtcctgacctgagattccagccactcctccttgcttagcacccttgatgctcaccctactgaatctattaagggaagcctttatagaaatgtcagatgcagacaaagaaatttcactttagtggaactccactacagtgtgtttacttttgtaaactgtggggacactgccaggtagcaagcattctaaaagcaatgccagcataatgtgaggtataggttaaatgtaagttcttcttattggctcaagccctgtctcatgcaggccacctgagcatagacattgccacaggcttattttaacctccttggtcagcaacctcagtttataagacctttgtgatagctcaggatttagtttgctagttatcactccagaatttcccagcaggagcagttgactgctgaggctgggtgggagaaacatttgaagacagcactacaggggacagccaactgcttgggatgaaagggcagtgacatccattgttctccacatgttctgaagtcagaatcagatctgaagccaatcagcaagcgcagtagcagactgtaatatggggtgggggtggggtgggctttgctttctcaatggagaaggaaatgaagcagttactgagttaattgtttaatcatggaaaatctgcagaacacatgagtcagcctgacttctgataaatcatgtgaggatgatataatgtctagaaagtttagcagcactttcagctagatttgggggcctttatttctcattttctctgtcatatatgtgaaaataattaaatgtcctaaggtacacttatagaaacgttaagcagagtattttaaatctgaaactgtcttttttgctgataaagagactgaaatgagccccaaataaattccaacagttgtagttgctacaaattgtgttattaaaaagttaagtttggggtttctagcaggaacttcccatattatttgtagccacagatattactgtgtatgagaaagaacctaacccagaaagacagactaacacacagcatcaccaagagaacacaagatgtgtctcaaaggaataatatgcacaggctggagttggtagaaacggaaagataaaacatagccaagaatccagggagatctccagggaagatgctacatcgggaaggagaactgaagttaaaattggcaaggattcttggtgagggtgagcaggaccattccatcagccaattaattttgttggtagtctcggcaggaaaaatttcacgggtgttttgtgtgggtggggcaggggcttcaaaaacaggacatattgagtgtaaagtggaatgtcctggtgatgaagtagaggcaatcgattctgatgtctccccaccacaagctcagcactgcagtgactaagatgtcaagagcaaaaggagagtaaggggatttgaaacatagtttcctgggtctgagacctggagagtcaggcattaggatgaagcactgctggctgatgcggtcctctagcttcactgtcttctatcactgaaggacacagtttctctacccttcacactcagcgccatgaccagaatctgaaactcaatgtgtggaatgatagaacgcctcccgtgccttctatcaaaacaaagaggtcctgccatgctaggtgagacactgctcccaaatttggaactctctttggatatctgtaagaacattccactcagagtcagaggacatgtgtgtccctgaagagatttcaaatggatggtgagttcatctgagtctggtgcttctgcctgaactccatacctctctcctctacccgatgctcacaccatgagtctctctgcattgcacacagctcacgccctgtgtctctctgccttgcatactgctcacacctgtgtccctgtcttgcctactgcttacaccctgtgtccctctgccttgctgctgtttcccacaactttgccattttcttgctgcactatcatacttagaagataacggttctgaagatgtcatttatcagaaaaattgctttccggagtttcattctctgtgcttgagttaaaaaagatgaatttgaccaggatttgtcaaaggtacccttcttaacattaataacacttacaatacacaaacatctagtgtctagtatctgttttatggaaattacattattttacgagcccaagaagctttcattagggaacactgagaagcagccatagtccacacttcgtggtcaaagagtcggttcttcctgtcctcctggaagatctgacatttcagcccctgagcagatgaatgaggagagacctaaaccatgtattaaacttcagatttcatccaggacaccaggcataaaactgaaaactgatgatctgccctcccttgggtcaaataacttataatctgtcagatagatagagagtgggatgctgtacttgtggaatataacagtagtcatgagcagatgtttcttgcactgaaaaatgggtttattaatgcatacttataggggaaggactaatctatgatcccattacagcatttaattaactagtcagctgttgaagatccatggtctacacatgagcgataatcgatttttggttttgatttttccacagaaaagcgaatgttgattgcaaacctcaagaagctcactcaacaaaactgaatcaatattttgttttgtcttttgttactagatatcagaaagacacacttgtgtcttcttcccttttcctttggccttacatgggtgcagttctcatggtgtgcagtagtggtgtgaactggaaaaggtattcaatcatttgtgagattgtaagacagtaatggtatgccaaggttgtgtgactaaatttatcactgaaagttagtcatgctgtagctagggaaacacatggtcctcagaggactgtcataaagaagggattaaaaatgtcaggtataacattagcttgctttttactgtaagttagatgattcatcacttagctgtgaacaaactggactgtgataaaggacacaagagggaagaagcttgaccccatgctcacacatgctcatacatgctcatacatgctcacacatgctcatacatgctcacactgctcatacatgctcacacatgctcacactgctcatacatgctcacactgctcatacatgctcacactgcttatacatgctcacactgctcatacatgctcatacatgctcccactgctcacacatgctcatacatgcttacactgctcacactactcatacatgctcatacatgctcacactgctcatacatgctcacacatgctcacactgctcatacatgctcacacatgctcacactgctcatacatgctcacactgctcatacatgctcacactgcttatacatgctcacactgctcacacatgctcatacatgctcacacatgctcatacatgctcacacatgctcacacatgctcacacatgctcatatatgcttacactgctcacactactcatacatgctcatacatgctcacacatgctcatacatgctcacactgctcatacatgctcacactgctcatacatgctcacactgctcatacatgctcacactgctcatacatgctcacactgctcatacatgctcacactgcttatacatgctcacactgctcacacatgctcccactgctcacacatgctcatacatgctcacacatgctcacacaggctcacacatgctcacacatgctcatatatgcttacactgctcacactgctcatatatgctcacacatgctcacactgctcacacatgctcacactgttcatacatgctcacacatgctcacactgctcacacatgctcacacatgctcatacatgctcatacatgctcacacatgctcatacatgctcacactgctcatacatgctcacacatgttcacaaatgctcacacatgctcacactgctcatatatctcacactgctcatacatgctcacacatgctcacactgctcatacatgctcacactgctcacacatgctcacacatgctcacacatgctcatacatgctcacacatgctcacacatgctcatacatgcacacactgatcatacatgnnnnnnnnnnnnnnnnnnnntgctgtagctagggaaacacatggtcctcagaggactgtcataaagaagggattaaaaatgtcaggtataacattagcttgctttttactgtaagttagatgattcatcacttagctgtgaacaaactggactgtgataaaggacacaagagggaagaagcttgaccccatgctcacacatgctcacacatgctcatacatgctcacactgctcatacatgctcatacatgctcatacatgctcatacatgctcatacatgctcacatatgctcacacatgctcatacatgctaacactgctcatacatgctcacacatgctcatatatgctcacacatgctcacatatgctcatacatgctcacactgctcatacatgctcatacatgctcacacatgctcacactgctcacacatgctcacacatgctcatacatgttcacacatgcttacactgctcatatatgctcacacatgcttatacatgctcacacttgctcacacatgttcatacatactcacacatgctcatacatgctcatacacgctcacacatgctcacacatgttcatacatgctcatacatgcgcacacatgctcacactgctcatacatgctcatacatgctcaaacatgctcacacatgctcatacatgctcatatatgcaaaacaagccagtcctgcagtacccagcagaactggcagaaataagcaatgtgtaaaataaaatctgaatggctaattggtacagattttatgttatgtcaaagtagtgctctcaagaccctggggaaccagtaacccttctctgaagggaggaaactgaaatagtatccatttgtaacactggcacttgaggaaatagaaacagtatccatttgtaacactgacacttgcagtagaatgctcacccccttccattcccaccctggcagtggttctgtgatttggctgacagatcctcttgtaaggaagaaaccttgtaaaaggtggaattgtcaaagtttcacttctgtaaagggtgagatcagatcctctgggctgatcttgtagaaggcctgcgttgggtttccagtacccacccaccctcccaatctcaggagcattatgtgctctcttctggcctaaggactgggtacctgttcctaagcgcacatagtgcccccgcttatatgtacatatcattaaaactaaaataaatatgtttagaagattttattttgaatatgtaggtaaattttaattccctggcattacaaaaatttgaaactttcttaatgagtgtattcattcagcatcaaatttgaagttctaggagaaatgagacatccataggtgagatgaatctccagaaactaacaagttgatttcctatgatgtggnnnnnnnnnnnnnnnnnnnnnnnnnnnnnnnnnnnnnnnnnnnnnnnnnnnnnnnnnnnnnnnnnnnnnnnnnnnnnnnnnnnnnnnnnnnnnnnnnnnnnnnnnnnnnnnnnnnnnnnnnnnnnnnnnnnnnnnnnnnnnnnnnnnnnnnnnnnnnnnnnnnnnnnnnnnnnnnnnnnnnnnnnnnnnnnnnnnnnnnnnnnnnnnnnnnnnnnnnnnnnnnnnnnnnnnnnnnnnnnnnnnnnnnnnnnnnnnnnnnnnnnnnnnnnatgccaggatagggaagcaggagtgggtgggttggtgaggagggggagggggttatagagaaaaccaggaaaggggataacatttgaaatggaaataaagaaaatatctaataaaagaaataactaaaaaaagaaaaagaattggtttccagtgaaatatattcagagaccccagtttcttcctctttttctgctttaatttctggtcataagttaaggagtttcacttggccacgtgctccttactattgccttccagaactatcacattccagatgaaatggaaccacctgaacaaggattgggaaactcaagtaaaaatgtacatgtttcccataacattggctgtataagaatgataccaaaccatttacatatcagcatctactaatggatgtattttttaggaatagcagaataaaaatatatgcacataatattgcatatggaatttttggtatgtcaggttttggtacatcccaatattcaacacaaaactgtccttagctgctgagctgcttgctttaattcacactttcaccctgtgttttagggttttgctcattgaatatttattttactcctttttaaacattttaccataaaaattctggttatactataaaactggtctatataatcagacttcagatgttcttaattccactatgataattatttcttaacagaagattgatggtatttttgtttttatcacttcctttgatgtctgatattctgaagtgttcttgaaagaagttaaatgtgcaaatttggtgggcagggggattggcccttgatttgaaagcttatgtacatttctcagaagtacaaatacattgacatttaagtaaatgttgctatgtgaatgttggctagctgttgggacatttgccacaatagtagaggaagacagattatcctagtaatttgcacaatgtgctggagaaatattgctttctgtcactggagaaaacaagagaaaattcacctatatcttatataatcaaatattgttttgttttgcacaaaacaattatttcctttatgtatgtttttctaactttcattaattacttaaaagcattggccaatgtcaactagacatatcctttctgcataaaattatcaaatgagcatggaaaaaggatgacgaaattatttatcatatttcctgtggagttacttgactgtaccaggactcatagccatttctgtgagtgtgtctaaccgattgcctcagtggagatagttaagtcagggtctccatggagatacctgccagtgtctgcaaagatgtctaaataacagtgtttctctggagatcactggctcagcactcctgctagtaccattttaatacatgtgcaccatgtctacagcattttctcagttggagtgaggaccatcaagtcagtgcatctatgtgtgggctggaacaacatcctctcctagttttttctgcacagacattggcggattccagcatcctggttctgagatgctttgttgatgtgtgatggaaaagcacagacacagccaagggtaggtttatctgcacatgacctggggtgggtgactggagctctagatggaggttgcaactgttgccagaggctgcaacggctgtctcttaagcataggatcccaaaagggattccttgttnnnnnnnnnnnnnnnnnnnngtggtggtgataatggtggtaattgtgatgacaatggtgatggtggtcgtgatgatggtgatgataatgttaatattggtgacagtaatcataataataatggtgatagtaatgatggcagggctggtaatagtgatgttgattatggtaggtgcattgatgtggaatatggtagagatgatgctgatgtgacagtatggtggtgttgatgttaatgctaatggtggaagaagggtactatttgatgtctgactatgtctatatgtgtctataaatgcctttcttaccaaataacatcattcatactttttgctgtaatgtacttcattttcacatactatcacaatctcatctaaaagtgaaactacagtttcaaatattcatctttcattgttggtaatccttaagacggctgaatcagacctttacaacttctgcacattcagttggggctgtgtgaatgtgtgtgtgtgtgtgtgtgtgtgcaacttctgcacattcagttggggctgtgtgaatgtgtgtgtctgtgtgtgtgcgcgtgtgcttgtgtgtgtatgtgtgtgtgtgcacctgtctgtgtgtatatgtgtatgtgcttgtgtgtgtgtgcatgcttgtgtgtgtatgtgtgtgtgtgcacctgtctgtgtgtatatgtgtatgtgcttgtgtgtgtgtgcatgcttgtgtgtgtatgtgtgtgtgtgcacctgtctgtgtgtatatgtgtatgtgcttgtgtgtgtgtgcatgcttgtgtgtgtatgtgtgtgtgtgcacctgtctgtgtgtatatgtgtatgtgcttgtgtgtgtgtgcatgcttgtgtgtgtatgtgtgtgtgcgcacctgtctgtgtgtatatgtgtatgtgcttgtgtgtgtgtgcatgcttatgtatgtatgtgtgtgtatgcacctgtctgtgtgtatatgtgtatgtgcttgtgtgtgtgtgcatgcttgtatgtgtatgtgtgtgtgtgtgtacctgtctgtgtgtatatgtgtatgtgcctgtttgtgcctgtgtatgtgtgtgcctgtgtgtgtgcctgtgtatacctgtgtgtgtgcacctgtgtgtacctgtgtgtgtgcctgtgtgtacctgtgtgtgtaccttgtgtacctgtatgtgtgcttgtgtgtgtacctttgtgtatgtgtgtgtgcctgtgtgtgtgcctgtgtgtacctgtgtgtgtatgtgtgtacctttgtgtgtgcctgtgtgtgtgtgtacctgtgtgcatgcctgtgtgtgcctgtgtgtgtgtgtgagcatgcactcatgcacacgtctgcacacctcatccacagtgattcatttcatttaggagaaagtgttagcaagggtaatccatcagaataacttattccatgacagcgctcgcctttgccacgcacacctcgtaatggaaaccagggtgttaaatggctgtttttgttggctggggatgtcccagaatctccgtctttcttcttgcaaagatgaaatgataaggcagtgtgattacttattggttccaatttacttgctgtcaactggttcagtctggtcagacttcacattcccctcacacgggttcccagccttgcttgtgggtgcatagctccgtttgagagacaaacatcactgaatgcatgggtctgtgactcctgataggtgctgccacacttacatatctgtcagtctattgctctgaatatgaaaatgacatgagatgttctaataagacactttggttcctctcttagccttgcaaccatctaaaatgtaagaaaaatatatgctgtttagaaatccaacctcagcttgtatggattcatcctttgtgattttgtgactggagatgatttgtacttattatggtataaaatatatatgcatattataaagcatattgttatatctcatttcatgtgatgttaattgcattttattcttctatgtaagtcataatttttgactaagtatatgcttttagaacatcttaaaagtccattgattgttctaaagggttggtggtaccaaaattcctgtagctgtgtgttttcagttgcctagtctttttttttttcctgtttagaggatgctacaattttttcttgcacatacagggattggaggtgtgtgtgtgtgtgtatgtgtgtgtgtgtgtgtttctatttccaatacttacatgcagtgtacacatgcacacatagggagtatttgacacctttgtacatgctttctgtaacactaaaatgtgtttcattcattgttcattgtctttgtctctcccttgaagtactgtattctgagaaatttgtttattttgcccacagtgggatcacagagattgctctctctcctcccaagcccattcaccacgactgaattgtgcttatgttaaaatggctatttagtgctgttgaggatttgtggtgttcaaattcctatcacagaatgcagtaacggttccaagtttattttaacatctctcaggaacacatcacaatttttagtttccatctacagggattggaaatgtattcatctgtatatattatatattatacctgttagtgatgagaaaatagaatctgtagcagaaatggaatcttgaaagtctttggggatacattagtcgtctttgatggtccctcaaccttgattcatgactgtctctgcctgttgcctggcagctgcagaaactgagttacctgacttccctgaaggggttgagggagctgatgtctctggcctccatttccctacgttctacccacatgtagcagcattccctaagcactggagtgtaagcaagtgacagtttagggcataggctgggcacattctacttctagtgtgtgtgagacagccagtccttagtgataagaagagggagatacttggaagagatatgggaagaggagaaaagagactgttaaaatggacaagggcaatttttagaaaatagacctagtgggcacatacggaggctgggaaacatcctaacgctaacttatccttatgacagaatatatctgaaagagactaaaggctgattttttttccaataaatttgattagaagacactaatttgggcaataatgcaaagtagaataagattgaatcatggtttcctggattgagctgtgccagactctctggccccttgggggttggccaccttaagcttaagtctcccatgtcctcctgtgcagttaactacagtccactccttcccatttctaccacatgcctggggccagctcaccagccccccttcacctgctttcatagcctgggaccctatgacctattggctagaagtgaccacgtgaagagacagtgggtctcagagacagtttacccactgatgacaaaatccctcacccatctccttcttggactagctgttcttccaaggcatcggccctttggcagctatatgccctcagaaagaacccaatcttttcattgcctggtggccagaaccactttatagctgttagctttttactcaaaagccacttgtgggtaaaacagagcatgcaggatggtgaaagccatcaaattacctttaagtgacacagacatcacttagccctgaagctggacagttcttcagaaaaagggtaaacatagttcctttttttttttttttaaattgtacctgctggagtaaaacaggataaaaaaatagacagtcagacagtggctgttaaagcagccatttgtattctgttgcaacttttaacttgtgagtcagttacagtgtgctgaggtccgttgatgcctgtgcgttgtaatggactcgaactgagctggttataaccaccatttatgtttgttactgtgctcgccagagtgatctcccatgactgaatttgttctttcattaaaaaaagaaaaaaatagagtttctgttaagcttgagagtgaatccatgcattcggaggaagatgccctgttagggttttgttttcttttgctagcaatgttactttgctgtctgagtgtccatcttagagatgtttttcgtatctgcaaacagggtttgattggaaatggctgtagtcttagatgtgtttgactgatatctcagtcctgacacctacattttgaagtacttggtgttgagtcatctgaatttttatgaagatgtctttcctagactcgcatccacaacacaaggtaccattgtccctcagttcacacctgtgcttcgccttgttcccaccctcaactcctctaggtttttcttcacattgggtttctaaagaaccacatcctttccaaggacttctttgtttttgcacaaagctagcctaagctcttctatctcctccctggtttctgtcttgcatccatacttggcaatgccctaatctacacctttaactcagtcttctatgactcaggtacgtccattgccccaaactgtctggtgacctctcattccctcagactgatgcagagtacactgcctgtcctgccacactgcctccatgtgcacatggcagcctttctgttctctcagagattctctcatccttccttgtgggcatctcaccatgttagttcctcacctctgtgataaccacttcgcacgaatcaggaaaggcttatttgtggtcatgacctcagacattttagtccatgatacaataacaccattgcgtctaggcctatggcatgaggaagaacatggtggtggggaggtgtagtagaggaaaaaaccatacagctcaaagcatcccagaggcaaagagagaaaagggggctagggattaaatacacacccatcaaggcatgcccctcccccacagtctccctctgctaaactgtgtttcacctcccaaggtcttcaccatcccagtctcttatttatctgtgagccgtcagtggattaatctacttgtgatgtcagaaacctcatgatccaatcacctctcaaggactgccttgaacacaagcggacctttgtcaacttgctactaactatgtcccataagtcccagcttccaaccttgttcccacaggaccatggccaaatacaatacaaactacagttctatttcaaatatccctttaatcttcaatagttccaagtgttaaaagtctaaagtccatgtctcatctgacacccaaggcaatcttcacctgtgaactcatataaagttaaaaaagtaaaacccaacacaatagaagagaataagcattctcactccaaagagaggaattggaaaaataataaggagagattggaacaaagcagactgaagccaagcagggccaataccaaatattacacctccatgtttgactcctgagattcacggaagaaccatctgtatccaaaaagtattgggcagcccctctcgtccagctctccttctacagcacagacggctgctctctgggcagcagactcactgtgcttacagtttcctcagtggacatcttctggccctggcatacagtgagccctcagggcttctgttcattgaatccaaccatgccacacatcccctgcctattggcatctctggtacaaagctctgtgactccatcagctttgcatccttcatgcctataagatcagtactataggtaccatatggtcacaatctgccaccaacttggactgaagcctgccttctttggactatagtttcagtagcttcactcctgaccctggggaaacacttcccagacagttgctcttcagaaacggggagccttttctgtgttctcatccccatctccatcctttgggctaagtttgtgtttcacaggttatatccttggatggatgggctcttgcctttcctattgactcaatggagccaactcttgatcttctcatatcctttactgcaattttaaagttgcccctgaagctcctcactaagcttcatgttttgatttctgttggttactgaacagccgtcctgctccagactcaataccagattgaaattccctccaccgaggaaattagtccatttctccctaatctcacttcaagcaagttctaaagtcctggacagaatggaacctgatccttcaccagatgtagcccaggctgtgctagagtcctcgctgcactctgaagcttcatgcaccagacctccactgtatttttctcgacattctgatattccaaattcccaccagagtggcccaggaacctttgtgttccatggcctttatcgagcacagctccagacgcttccctgttactcctgcctacaaagcacacggcacacttagcccaggaatgactccactcccactcctgttaatgtgaaaagagtaccttgaagaagacagagtctaactgtggcttctagtttgtacagaagtccaacagggcaggggatgcttgtcagcagaagcccgagactgctggccacactgtctcctgtcagaaggcggagagtgatagatgctgctcaccttacttcctcctttgtgctcatcccacgaatgcctgcagttagcagagcctttccaccataattatcccagtctaaacgatcccttaccaccatacccaagagtctcatctgtgaggtgagtctagatcttgctaagttaatgaccagggatgaacatcatggtagggaaagtcttttgtaatctgactcatgactgattttatcaagttgtttagagctcagacaagagttgcactccaagcccattagggttgcagtgatttttctcatggacactgtctcctgtaagataatcctgatgagattgtagctcccacatattctgccaaccacactgtcaaagaagtttcagaacagaaagactcatacaggaaatcaaaactggtgaattttcttgctcgttaacttaagcaaacacataacaaaaagcaagaggaggatgagtcaactttgtcaggaaaggcaataagcaggcagaaaagccattccccagctaagtccaggaaacagggctcatggcagtatggttaggagaagcacccaggagtagaaagatcttaagccagtgatgcacgctttctccaccgaggacagactctctggctgatgctgtccacaccgtaagaatccccagaaaccataatctcaatcactatacctgtgtcaagcataagaggggctcagaacatgcgcagtgtcattcatgggtgctccattaggatgaccgagacggaatgatcacccagaaggtggaagattgcggccctggaatctgtatttgacgttttcaaccttctcctctctggctgatgctttttgttgaagggtgttttaggttttgtgtgtcttgtagctccctaatgattttctcaaggagtctgtgagggagcagcccaaacttacaggaaggcacggtatgcccaatctctgggtgtgtcttcacatctgacattgtgtcgatgggtgttcaggtgcaagggagagctgtttagagctgtttagttctcgtttgtgctgagctgccagaatgcctgacttgcctttcttttgtttgttttatgaataggatgctgaggatactgagctgacttccctggaaaggattgagctcttaatctatcatcaagagaggatgaggctcttgggttgggtacagccagctggctgagtgtcctgacaaaagcagagagggaagaaaatgtaaagacaaccagagatgcgagggacatacacttgagcaatgagatactcaggctggccgccacagacatccaggcaagggacaacactaccccaaannnnnnnnnnnnnnnnnnnnnnnnnnnnnnnnnnnnnnnnnnnnnnnnnnnnnnnnnnnnnnnnnnnnnnnnnnnnnnnnnnnnnnccaacctactcactcctgcttccccatcctagcattcccctacactggcatcgagccttcacaggaccaagggcctctcctcccattgatgaccaacaagtccatcctctgctacatatgtggctggagccatgggtccctccatgtgtactcgttggttggtggtttagtccccgggagctctgggggtactgtcccacctgaggatccatcccatatgcagtcacaaaacccagacactattgtggatgccaacaaaagcttgctgacaggagcctgttatagctgtctcctgagaggctctgacagtgtctgacaaatacagaggtggatgctctcagccaatcattggactgagcacagagtccccaatggaggagctagagaaaagacccaaggagctgaaggggtttgcagccccataggaggaataacaatatgaataaactttagggttatttttatgcctcttctttgttgctgctttgccacactgctagtgagggtgctaagacaaacagataactacaaagccagtgagatcctataagaaaatcaagtatatcacgactaggattccatgaccaggaatcaaagctctgaaacataaaatatcagcctttcatttgaaagctcattctaactggatgctcaatcatctatcacaacagcagtttaagttagctcaaacttctctttgtagggcctcaaaggaattttatgtgtgcccttaaaatattctttccaacaccacaagttactcttagatttctcttttgtagtgtttaaggtgaggagtgagggtcgaagggcccagagctaggcaggcacagtaccgtaagttcatatgatgtggtttgccgaatactaggactcaaccggtagagcttagctggcatgtgaccatgctgcagggttgctatggtaacatcaaaccgatgaatggaccacctcccagagacagggctgtgagtaagtgtgaaattgattcagttgtacacaggaacacagtcaagccaattttgtgaggatacaatttctggtaggaaatggcatttttaatgatctagacattacgaatacgatattaaatatttgctttggatttttcagtaatgtggtatttaaaaattaagtgcgctgtgctaattttatgctgcatgatgtgatttctgtgttgtactcattccaggtaacactcattttgtttcctttcgtctgaatttatgtatctaataccgagtttgcacttgagattaaaattccaggtatctatgcttccagttaaactgctcaagtgtttggttatttcagactattatgcttagagcaacggtttctgttgttgttgctgttcttgctttttaatgaaatataaatgaaagttgttctgtgcagacattgtttccatgtaacgtctgtaaattgcattttgcactgaacagtagccaacgtagcacaggtcagggaaagcaagtattttaatatttcagaacttgggaagctcgtggtttggctttatggaagtgatgtattcacacagcattgctttgtgttcagaaccgttttaggagccatttatcttatagtatgtctaggcatgaaacatgccttgaacatatgcaatgtgtttctttaaattatttattttggggcaggggatctgacaaaatgatgggtttgtatcccttccttccccacacaggctttgtctacactgaagaacgtgccctacctaagcgtccctttaagagctaatctaggggtacttttgagggggcttctaatggtccgtctatggttctgtctacgggtccatccgtctaaggatctgtaaggttctatttaacggtctatctaattgggctaattgccaaccccaccctctgatatctggtgtagctggttttaacagaacttagcaggcagttgagatgagcatgtgtctcgtctctgggacaccctcccctaggatcaagggctgttgactttcccattagtagaacagagaagcatgacttgctggcatagccttttcttctcctggcatagactgccatgggtagtgtttgccagactctggcagaagccctgctcacaatgcatttcttctttgctgactaaatggaatgctctgagggaaagcccggctacacttgtggcttcctgatagttacatgcaaagccctccacggttctgacgaagcaggacttgtgctttagctaaacccaaccaggacaccataagctatactccttttgtttcatgactaaaactttggtaatgtgctggtgtttatctgaataaattcacacgttcaaataacgacataaattaaacttgaccttaaactcaatcatgtactaatctgtttgtatcgagagctattacctattttttaaaatgttaaacccatttgaacctaaataaagtgaactgttcaagccaacacatcagatcattgctttcaatccaagtcgttttggtaatgatgctgtttcctagtggaaagcatcaagcgtattcaaaatagaatcaagagagaggagaaagaggatgactctaagcacagtgtctgtcaggagaaagaggacgactctaagcacagtgtcaggagaaagaggacgactctaagcacagtgtgtgtcagtcactttgtccaggctttgagttacgtgagtttggccactgcattaactgaacctatttttttctatcctgaatgagctctcacacaagggaacctgtctggactagctcaggcaagcttgggctggtcaacaaagcgcccctgccggaataggctctaagcaatgggatctgctatctatgtctgtggaggctggaggtctgaggtcagagtcaagttccacagatagagcagccactttctctgcatcagctcagtcagcacgaggctaagggggctcccgggtgcttctccgactgggtgctgtattatctgcctactccgccctcataaccgaatcacttccacaagcccctgcttccaaatcttaccacgctgaggggcaagatcccatcttataagaggatctgctcagtgtcttacagaattctgtcagaagaaagtgtgcaagaaatgagggtgtagtgactcactttagatgttcacacacacacacatacaccacaccacacattgtggaagcttcagtgtgtgacagtgtgccccacagcacacccttttgtccacacattttcacttgtaaatgttcactacagtgtgaataacattggtctggttccaggcctctggcttctgctacactatcagtactggagctgtgcaggggctcctcccagacatcctgttgtcaccctgcatcatggaggtcctgcagctttggttctgggggactaccttgtatgtgctccagaagttcgtagatggggtagatgtcgagatgttgatagttgggccaacttaaagacctggatctgagtctgggtggtagctgagctggtcagcctaccagctctctcacacccacaccaccagggtgagctctccagcactgcctccaccctaccccactccctagctcactcagtacctcagccagcaacctctcctgctctcatgcccttggggccagctcacccacacccaggccaccagggccagctcttctgtgctgcccagctgaggtgtggggacccactccccccaggagatgcagcttgttctcccactctcgtgcccttggggctggctttgttatcaaggccatctctactgtgctgcccaggctaggtgcaggacacactctccctggtgttgcagccagtgaggggtggggctggctctcccactctcatgaccttgggactcctgtctggtgcagtttgaggaaaagggggtgagcacctttccttgcctaagctaccccacagcagatgaaattttcaaactctctgtttataattttttttaaagattattttcacaaccagcttaaaaaatcatggggcttattttcactgaaagatgactctgtattcttgattataaggcatctaatctagaaattttatttagaaaataaatctatgataaaataataacagtcctaatacaataaaaccagagagacaaatcctcatcactttctgaacgttgaataagttttgggaccatgaaactttcttcaatgtcattattaactctttacaaactcctctaagccaggcggtggtggcacacccctttaatcccagcacttgggaggcagaggcagacagatctctgagttccaggccagcctcgtctacagagtgagttccaggacagccagggctacacagagaaaccctatctcgaaaaagcaaaagcaaaggcaaaagcaaaaacaaaactcctctagattgatgctatcatgtcaattttatttcatttttgtctatttattttaagatatgagtgggtgtgagtatatgtgaatggatgtgagtaggtatggatggatgtgagtagatgtgggtggatgtgagtaggtgtgaatgagtgtgagtgggtgtgagtaggtctgaatggatgtgagtgggtgtgagtgggtctgaatggatgtgagtagatgcgggttagtgtgagttggtgtgagtggatgtgagtgggtatgaatgaatctgggtgtatatgagtggacgtaagcaggtgtgtgtgggtatgagtggatgtgagtgagtgtaggtggatatgagtgagtgtgagtaggtgtgagtgtgagtaggtgtgagtgggtgtgagtgggtatgagtagatatgagtgggtgtgagtaggtatgagtggatgtgggtaggtatgagtgagtgtgagtaggtgtgagtgggtatgagtaggtgtgagtgggtgtgagtgggtgtgagtgggtatgagtagatatgagtgggtgtgattaggtgtgagtggtgtgagtgggtctgaatggatatgagtagatgtgggttagtgtgagagggtgtgagtgggtgtgcgtgctcatgccatggtgcatttgtggagctcagaggataccatgcaggagtcagctctctccttccaccaggtggtcctggtgactggattcaggtttttatcagacttggtattgtgagcttttacatcttatatccctcattccctttcacgcatgaggaagttggatgtgaggcttccatttgcctggatttgaacaggaaatggttgctctgggattcaggctcgttctcaactgtaagttcctgctgagagctgggctaactgtttacagagtggttaatacataaacgtgcagcgtaggtttgcatgcagaggatgttctaaactaaaacagctactgtgtccacaggctcttagtgtttaggacaaaatagtaaaggaagatattctaaggaggtctaaggtaatagtatgatgttttgtggcttttaattaaagtgtttgagataaactcaatgcacatcatttggtttcagtcatttagacagaaggttagaacaagccaagtttgtgctgtagtttcaatgttctatcctgaagacactaaaaaaagtttggacgactgaatctgtgtaactttagagatttgggaattggttcaccagtggaggatgagaggatgcagggaagattaaagccaggagatgagggatgtgccagactggcaattagccccaggaccaagcaaacgtcatcaaggtctgtgaacagctaaggatagtaacatcaaggataattgatgccaaagctggaaagggctacaggtgcctgtgcctgtgatattagtgacaattctagaaatttctaaagtacccaaaggattggcataagggttggaggaaatcaatttttatttgcttttgttagttgtgcactaaaacagattaaagaattgttatatacttagggcatgtatattcacgctacatgcatgttctagtcatcagcctgtgcacagcgtgttcatcgtacagacctacacaccttaccatctcagagcaaagccaagaaatgtattggggtttcatttctggagaacagacctagctaacaaggtctatgctgtctgcatgtgggtctcgatggcattgactacaggaaagcccagtgaacagtcaatgagtgaatatcatctttgtctttgtggtactagattgagctctcaacactcatgcttcctgtgggcagtgggctccagtccactccttcagtccactcccataagctatggactataataatctgtatccgtctagtgtccaaaatataagtaacatttgttttatttggaaaaaaaaaaagacttgaaatttcacagcgtcatagtgctcactcacagaaccagggaaattagcagtgaaaaggtcattggttgcaaacttctcatctgtagtgagctttagtgaggccatttccaggaagtactcactagtctttctgagcccactgtggttgatcacaagtaaagtgcctactgtctccagtagcttgtttttctcaagcatgctgtggtagatcactagtaatgtgtccactgtgttattctgcatggacaactgttcacaatattctctatagcctgctctctccccacccccacttctattttctccacgacagagtacccaagactactgagattccagttgagcccctcaatatttgactctcaaaacctctacctactttaatggcatacttgaaaaaatctaatctgaagttgtgtctggcagtactgctaagttccgagagggatgtttatataagttttattcctagcctttactgtagtaccatgagataggcacacagccctcccgtctgaccaccactcatgccttgcctctcacttgatggcctttgagctacattacagatgagctgggccaggttcagccccatatatcatcactctgtcgatgctggcttaggaagcagacacagcatgagtcactgtttatgtggatggggtagaagcttccacatataagcagaaacttccagggcctcttattttctctgtctgtagttgtcacagaaaatcatgtgatcatatccgaatgcctcttcttatcatgatgtcatagagagatacatgggcaaagatgttgacatgaattccagctgtggagtgggtgaaagtcatgggtttgaatcctccataaggagtgaaaataggcggtattttacttttcttgatatttggttttagaaatatttttataataaatgctagttactttagtagatggaaaaatatttttaaaggcaatttaaaaagtaggcatattttaatatgttaaatttaaagttataggtattttaataattaaacaggcatgaacagttcttgccagttacatacttatattttactgactgagttactaactgaatattagcatttttcaaggtagcagttgggaatcagatggaccaggggtagatgtagggtagatttgaagagaaaatcaagtaggtcaagtagtcaactgtctccattgtggtgggtgagaggcatagaccggccatagaggactgtggtgtgactctggggtggtgtggcaacacctcgacttttcatatcccattcttcagtcctttattcacaagggaattcagactaatgactgtggagatgctgatgatggagaaatgctggctttgagctttgtatggacaccaccattgcccgtaggtgattcctctaacgtcctcccttgtttatatctctctgatatttgtccaactctctggagtttcactgagttcagaaaactttcaaaaccacgttgttagctgaagtaggttaaaattaagttgacgttccaccaacgtttttcatggtgagctggggactagtgtggctttgaaagcctgcaggattgagttcaaagccaggttaatagatagggataattatctaattaattatttaaataattaccataattaatttgaagtaaactttactttgtccactgatgactaaggaagcccagcgcacttgtttccttggtactagctgacaagccttgtgaatttcacttacacaacagaaggatatcaattaatttacagcaagattttaatacagtaacttcacacaaccagtgtcaagaggttcccaacagtcctgggctggtctaaagttgaaatctccctgtagctagactgagttgggagctgtaagagaagaggcttgttgttgttgttttttaattaaacaatctgatataatttgcaaatataaggcaaagttctccctgtttacaaagcatttctttcttttactttgttacatagagtttttaatcacaacaaaatcagagtggagtcaacagccaaggacaagctggataggctaaggttaggccacatctgattgattgtgttgtgagttgtgtatacactctgtgtttaaatccacccctaacagaaagagtggccatggtcttatggatgccctctgtccagttcaaagacctgtctcctttatagccctctcactttcagtgctccgtgtcgcagggttcacttctgcagtcctaagcaataggtagctcagatcttatctgcatgacattgtcacctcttaagcagctgatggaggttaaattttccagttcccaaatctgtctttgtcttgaaccctagctgtttctcaagaccacagcagtgtctttcaaagtgtagcataccagaggcatctctgacctcagagcacagcacttcaatcctttaagtcattgcagactttgagagacggtcaagcctgagcctatcatattccttcactgtggggatgaaccaaggtttccacgtggctccccagcaagccctcaaaatcacacctgtcttctaggagggagaacctaccatgagtctcttccaaagaaatcttcaaaatatttttctctcctagttgacaatgtcttgtcttttggtcaaggtaggtgccaaactccagaataccaaagaaaatactgaaaatacccaagtgtgtcatcaggattcagggcatggaatgtctctggtgatagataggcagggcatgtcatgtcatgacaactgggtctgagtgaagcttactctctaaagatgaattaccaccccagccagtgtgcttgcttaaatgcagcacactgcatccctgggaagtgggcagctgcaggagctctcagactctctgaaatgtactggcgtctaggaagctgagatgctccatttgtcaggatgatgtagaccatcggtaaccctgcactgctgtgctgtgagctcagatgtctataaggacaaactgccatggagtcaaaaacaatactgatgtaagcagtttcctgtcgcatatgagatataaaatatgggaagctgtgtctgaaaactagtcgcctttctagccaatcatatttaaccttattctgtcataagagattttaattataacactacaagagtcaaattataacataaacaaagtgttatggttttattttcaaagtgactgcagcttatatttctgattttacaggtgtaccagttttatattgaattattgatgagctttcccaggcctttcacttgagtcagtctttctgaaatgcagtcacatgatttttcctgaaatgtctttttctcgaggctttagccacattttcagttctgtgatgggaaccctgctagcatgtagatgtctgcgtactatgaggagtccatatacatagagggaacccctcattcttggagagacagggtcatgtttcaggtcaggggtccattcacagctgggtgcttgtggcaggtggtctcctctgcttagctgtaatcctgctgtcttgtccacaggtatggatcatcataggactcctatggtgttgcgaggatgaactaagggatagtggaagctttgaaggctcttgcctagaggcaagttcttgtctagttattacatagtctctatactgcttctttccatctggggctcccttctgtgtctgtagtggtttgaatgaggatggcctacataggctcatgtttgaaagcttggtccctggtaggtgcaactgttacattgtagctctttaccatacagtgccaaaggatggcagagaccaggcactagttttttggtggtggtggtggtggtggtggtggtggtggttttttgtttgtttttgttttgcatacgtgcatgtgtgtgtgtgtgtgtgtgtgtgtgtgtgtgtatgtgtgtgtgtgtgctgggactattttagttgcatctgtttttgtttttactttactaacagtgcacaagaaaccttctcttgagtattctatagacttgatccagcaattaattagcagaaataccatgttttctcatgtgttaaaaaaaaaagctaagatgtagcacttgtgtccctaccacatatagtataataatctgtgttttgactctatatgaggagtttaaagagctcaatacaagaaataagttttccacatggttgctttccatgccattgtatcactacagaagtgtggggtttgtgctgctgaattttagatgaaaaagtgtttcccaacacaattaaattctacagaagaagtagctgatgtactttgatattatgcaaattatgaaacagttgctaatgccgggatgagccttgagataaatacctggcttgcttatttacctggcatagagtaagtgctgaaggtggccatagtttttgttattggagaccagctttgacatccagagtaaactgaggcagggtttagagtcagcagtcgatcgccggcagtccatctgctggcaatagatcagccagcagacttttctctgaaggcacaaaagttgatacactggggcttgtgaaattcttccaacgggggtgggggggagtgggggaaagtgataagctttctatggccagcaagaagggatggaagaatcatacacacatgcacaaacacctagtggatgaagcaaggctccaatgagcaagctccaacaactccacacacatacatacatacatacatacatacatgcatacatacatgtatacatacacattcacactctgggtggatggagcaaagactcatgcatttggtggattaagcaagcttttgtaaactacaaccaactttatttttccttctatagattataattcccagcaaagtccttcaatcagtacaaaaatcataatgtgactacattctattttttattaagtgattcagtacaacgagtatatgtaggaaaacatgtttcccaatatcctcacctgaataagcattatatatagtacaggtaaaaaaaatatttccaacactacatttgtagctaagcaacttgttagagattcacaaagtgtaagcaagcaagggagttttctcagcctgattctttcactggcaggtggcaatttgtggttacataagaaaggttcattattttattatttatcttaaaattaaccttataaaatcttaaaagagtcacaaatctaaggttttatataaaaacagtcagtcatttcttcttaaatcctcaaggtgcacacccgctcattaacaggttttattaaatcacatcaggaagccgagggcaagaatgggcacaagaaatcaagcatcaccctgctcaccactcagctttagcaagaaggcacatcagctagtgctggctgggctgcttgttcttgttccaggacctcactaaatcccttgctcagtcatcaaaccagtgcctttctgaactcttagttcgctccctgagattttctacagcaaagccattagcaaaacccatcttaacctgactttattctccaggtgttggtcattgttaacaatctacatctctaagttctttcgagggggtggatgaatcattaactcgctccagcagcagtgcttggcaaagatcagtcactaataatatatgtgctaaggacactgcccagtgaggggctggaggcacccttggagtttccatgcaactcagagactatgaggaatgtggtgacctcaagggcaacaagtagagtgaaaccctacaacagtgtgacatccttaggacagctagtcctcagagctctgcctccctgaggtatgcccagcatgacgctaaccagtgggccacattctaggaattctacagctgctttgctcttgtccctgccgggctcccaggagtttgtgcattttcctcaaatgacttagaggagttggggaagctctgcagaccttttcctgactttaagtcaataattaaaacatttaaaatgtcatctaaacttccagtataaatgtaagaagcatgtaaggagaagccttttgataggtctacacagtgatgtgtccaattcccatcccccttgggattattaaacaaagaaaagtgcaaagaaatctgatggcttacctgagacttgctatggttgaggcctgtagcccacagtgtgctgtgtgcctagctctggatggctgtgaactgtttccttggggctcccaacctttcactcacatttccacgacacccccctcccccaacctcccagtaagagcgatgcttcagggagccctgagcatgccagtgcactgtcattcctcactctgtgttttagaacctgggactactgtgtcagctagatatatctgaactccagggaagctgtagagtccagagcttgtccccctggtgctgtgacatgctcataattacagactctggggactggaataattgtagtgtatttgcatcttgctcatgtgaattttgtcatttaaatattgaaaagttataaacatgtgctgaaaagaattttcaagttattaaagcttcccatttatgatttgtgactattcagcaggggtttatgatatagccttatatctttgctgtgcttagaaaataaggggagtgacctgctcacccacattcccttgtgtagattcttcatgtagaactgttgtttaaggcctccacatggcacaaggaacattttaataaacatttattcagaaatacatgtacatggcactcagttttaatcagtttctaactgttctatagtgtatatatttaagtatggaaggagttagatttgttctgtaacatagacacttctattttgcctgggcattgtttcaaagactcgtgcagaggtatggcctagaatgtatataatgtttttttaatcatatgatttatttcaaatagcaatgttggccttggcagttctctccaggagtgataataattcaataggctctaatgaattattcctgtttggagtttttccgaactcgaaagaaccagctttgctacccttacctcaggacataaccaagcatctatccccactccactccactgcctggcttctctcagactagagaggctgcagttgctgcagctgtaaacccactaaatcccagggttttcttcttgcctttcaaactatggacatctggtatcaatgtcttataccgaattcactcagccagttctctgaccagtacagctctgactttgaacatagggtcaaggcttgcaattgtactttgtccccctaaacctcagcacggttctttgtccatggtttgaggctgaataagtcaaccagagaatgtattgtcttatagaaactgagtgttttatttgtttttggaatttatccctgtgagcttaatacacatatacaataattatagcatgctcatatccactctctagttccctctacatgttcccagacaataaataaccaccttccaacttcatgttctcccttcttctttttgtaaatagcccactaaatccattcaatgttcaggaaacatctcataagaggagcaagaaagactgtaggagcccagagaacagggaggtgctgctgtgaaatgtgaacctctaggcatgacctgggtatcatggtttgagttttcaatgctcataaatctatattaacacatgctgtcattgaactattgcaataaaatgctatagaagtataataatccaaaagagagtagcgtgtcacatgcttttgtttctatcaccagcatttctgaggtcaggttaagagatggagagagtgacctaagacacgtggtgtagtgatgctcttgagtagtgatttgggtacacagaggtcaagcatcccaacagacctttacagcatagagtagcctataaaaataagacacacaaatatttgaaaggttggacatcattttagcctttgtaaaatgcacaagcttattgtaattcacaaacaagtatttgttgaagtcttgctgtgcagatgaatttgcaaaattttgcgtaaactttcaacgccctggaggaaattatccctctatatttactataaaaatttggtaagaaaatcaaggtacaaacacaaaaccactcaaagcaataaatatttcatgttgattttataatgcatttgattattttagcccagactataaaggagctataaataacggtagaggaggcaatagatatgagaagtggtagggaaaacacaaatttatcaaattacctttcttaaaaaaagaaaatgagatagttattttagagaataacatcccgagagttgtgaccgatgtgtggctagtactcttttacacaatcttactaagatccatctactatagcaacaacaacttggtcagacccaacttaatacttaaatattggtgttgattttcgcatgcctttcacttcctcacactctcccatccatcaccctgcttagaaggtggcctcagtaccacaatggatcttcctcagtgtggcccatgttgcttcttccttgaggattcaatttggatatcaaatttgttctagttctaaacatagcatacaggacctgctatagccacacctcctcttgctgtggccacacctcctcgtgctgtggtcacaccgcctcgtggtgtagccacacctccttgagatgtagccacacctccttattgttgatctgtggactgtttcagtgtagttgcacattagggttttatttatattttatgtcgtggctttctattagcaagctcattgtgtcttcataaattttctgttgtcttattttttagactatgttaaactggtgtgtcttttgtatcatactttatatcctcctgtagtaaatagtgtgaagtagtaagttttggttagccaataatcactaagaaatcacaaagaaaccccccccaaattgatgctcaatattacttttgatacccctttcatgggatttttgtagagtcaggtagatgtgtattgaaatttttcctagcttttgtttttatgtctatatttctgtctctatgtctatgtctgtctttctgtctctatgtgtcactcagtccaggtatgtttccttcaaattgtgacatgtatgtatttgaaaagatcagaagccattctcaagtgttttctggagccatgactctggaagatttgggttaatttggaagaatagttcaagaacagttcaatattctagacatttccaagcaaaagggagaaacacacagccacagccaagcctccaaacaagtaccctgatgtcatggatttattcacatcagcctctccagctccagtgcctttgatatgtgctttctgcctttgtctggagttctaatgtgcaacacacacacacacacacacacacacacacacaccaaacctaaatgttgcatactacatattaattttaaagtattaaatatttgttaccatatcaatgagattattttgagttcttgaaggtcttttttttttgctttttttattagatattttcttcatttacatttcaaatgctattcccaaagccccctataccctcccctcgccctgcttcccaacccaccggctcctgcttcctggccctggcattcccttgtactggggcatatgatcttcccaagaccaagggcctcttgaaggtcatttttaaaccctctgtcttctaaggaaaaaagaaagtatttcagcataaattgtatggtcagtacactttctgttgcctactaagaaaacgaacatcccatttaaaaatattagtcactttgatggcaaacctgacattcacgtctttggtagtgttttatggatgctgctgtacagtggaatgactcaagaattattaaggaatagcacataaagagttatatccctaggatgctgtttaataggctctgtaacttagtaatggtggcatttttatgttcccctcctgagcctagtgagtggagatgatggctttcatgaaccacagcttgggcatgaacatttggattgattttctatcctcttctcaaaatatgttgaccccctagtccatgttacttgtgtatgtttgcatatttagaaataaggtctttgtcgatgcagtcaaagatcaaagatcatagagaattaggggaaacccaaatcacatccgaccaccagtgtccttagatgaagaagaaaatgaggcaccagatatacacacagaagaaaaacatgtgaagacattcagacagaagaggcagcaagggaatgcacagggagataaagaaagacacaacgacatggagtaaacctagcaatgccaaggattgctgtcctctaccagaaaccatgagaggtgaggacagattcctcccagagccttaggcaggaacaggatatctggtgccacgagagacctcccttctaaaatcagcttctggtttatgctgctgggttatgatggcccagggaccagtgatgtacagtgagcatcagtggagttgctgaagataaaggggtttcagctcgcactatacatggacgtaagtcagtctccatggaccagctgaactttttaggttttgtggttttgctggccctggcacagtcaccttgagtctctctgcagttggtcaagaccattgggggtagagtgaaccctcctgtggcaccatcatatctgggtttgtgagtgagttgcgtgtcgggaagttctgtcatagggaacagtcaggcaccaataggtgtgggtgagggttctgcagtctaaactgagtttaaaatgactctgtctgtcagaaagtgggattgttaagaactgaacttcaggggctgcagagatggctcagtggttaaaagcactgactgctctttctgaggtcctgagttcaattcccagcaaccacatggtggctcacaaccacctgtaatgggatctgataccctcttctgaagtgtttgaatacaatgacagagtactcatatacataaaataaataattttttgaaggccaggcagtggtggcacacgcctttaatagcagcacttgggaggcagaggcaggcagatttctgagttggaggccagcctggtctacaaagtgagttccaggacagccaaggctatacagagaaaccctgtctcaaaaaacaaaacaaaacaaaacaaaacaaacgaaaaaaaaatgctgggcgtggtggcacatgcctttaatcccagcacttgggaggcagaggcaggcagatttctgagttcgaggtcagcctggtctacagagtgagttccaggacagccagggttacaaagaaaccctgttttaaaaaaccaaaaaaaaaaaaaaaaaaaaaaagaactgaactgcatcctaaacacaaagggagcagcatccagcctcactctgaaaacagagcagaatgctgacttcagcagatgctattgagtccttagcttttcagactagagctgtctcgttctcaggcctgtgagtggttacatccctgtcgccctttgggcactgggttattttcctttttcctttttggtttccagtcaatggcttttcataatgatgggaaggaaacaaacaacaaaatccaattttatgactttatttttgacaatagtaggcaatgtgctctagagaaaggaaaaggactccgatttaggttgacttttgttgagccttcattttttgtcaactcttgttctttttgcttcctcgcccctttcactgtgtaaatgacctactttgaagtttcaaataaaaagaagttaaatgggcttttatttggcccttgattctttttctaaaaactttggaaaaggtcctgcctctgagtgtaacgtggctgagagaagacagaaaagagagcttgtcactgggcatgcctccttcagcaagtgtgcacagagtggcttttctagtctgagggaaagagagagatctgccagtatctgctctatgcattgatagacctggctaaaacgtaaaggacgttgagctactctcaagggaacatgctgtgcagacatgtctgtaaatatgcctgtttgtgagagtgtacatgtgtacatgcatgcatgtgtgcatgagtacatgtttttcatgtgtgcatatgtgcatgtgtgcatgcatgccactgtatggtttgccactcagagtccctctactttggaagctttggtgccagagtgagaatctccccagtgcacgatggcagagcctgctgtctaatagagaaagtgtgctgacttcctgctgtgctgagtgcatgaatctctcctgtgattgtgaatttttatgatttatgaaatattctgttttccaggaaacaattataattacaatgacctcagaataaaatattcccctcacagtgccatgcgtaagtcaagccagtttgatgactatgtcctggactctcttgaacaggacagactgtaacatctttacctagtagtaaataggaatgggacactcacatagtgatctcaatggtcttggggtagaaaatatgtaactttaattttttaaacctatttttaatgatggttcttaaacattttaacctttcttacagcccacactcaccagaggtagtggaaaaggaagggtataggggaagtggaccggttttgaaaggttctctgtagcaaattccatctgtgttgtctggaaatcagtggttcagttcacagttggtagctgcagcttgacccactggcaaacactttacagatacaccagcagtccattttggtagagctgggatagcaaacacaaatcagcagtggtggaatgacctagctgagacagccaggcctcaccctcgtcatgagccagcaggagggaccaggagggatgccaggagaagttctcagttgtgcctctcagcaaactgaagatcaccaaagacgtgaagccaacaagccaagcgttgtacagttagctctatatgcaagcctagctcagccctgtccttggtccctgtcacactgtctgttgagtcctatttataccctccccccagaacattttaatgcctcagctgacattattctgccaatcagcctgattctgtggaagtggcaggaaattacagtacaccaccagaagtttgggttttttgtttttgtttttgtttttgtttagcacaggaaccccaacaaatgcagctcaactccacactgtaaggcagaccaatgcatgcgtgctgttagcaaagagtccttcatcagtggcctttcatgtgcttgctttagcagaacatcctctctcctgtgtctgcttcagcactaagttccttcatgagtctgccttagcctttcacctgtgtccactttaaaaaaaccttccttcacctttttgcccaagcaaaacaccatcaaacacaactgactttccaaagaaccctttaagttccacttcagaaatactctcttaagtgtcgaaaagcagatctgtgagcacagtcaaaacaaggacagatataacaaggaagcagtggtttatcaatcctcaccaggaaggaagttgttagcagctatggagtatgacggtgcacacagaatgtttcaaatagacagacactctcaaaggacagcttgaagcatgtgtttatatgttagtgtgactgtgcttgagtcaactcataggagaaggcaggcaggggtcggtcagcttgacagaacaaaatgggagggtcctggcacaagccaccaggcagagctgtaagctcagctctgctatgctgccaaccctaacaccgggatatactggatctgatgacagctgtgatgccactcacagcaagatggaactacccagtcattacagtctgaggctctgggataaacagttttcttgtgtatcttaaaggtgacaacgagcaatggtaatatttacatagtggtgaattttgacttatgactctggaagttactgtaaaaccaggtatgtacactctcaatcagtgagaaccctctctaggagtccactagtcaagatcttcaaggcaggggtcaccacaccagctctttcacctgatcacacagagttagatggaagtcggctctattgatcagctcatggggcctcctgccccctgacaatgtgtctccgacattctcaccaagagctgatgatcctgggcacccaaaaactcccgggcaggcacagctagctcacataaataaacgctggcaactgccacactcaaggctactctggagagtggcagagaccaatctgtgatgtcagagatggacgcaatacaaacctgatgaatgtcatagccaagccagctacgtaagccaacgtgctgactactctcatgcgattagctaaacacagccttagcatcgccctcgccttccttaaacctaagctttgtcaaggtacccgagaggagaattgacttcatgtcctgacagcctcaatccccagcaagcctgcttccttgacttattcaagagttctctgaactagtcctgtattctgtgatatactcctatccaggtgcctgagcttgcctgcagtgaacactattctctctggagcagggacagctcagacatgttcaccttctagagtccttgggtctaggtagcacactgtcgcccactcaagtggtgctttctgctcacctgtgaccactaagtctcctctcacatcctagctggtttatgcaagctcttcccagtgcacctctgccaccaccatctatctagtcaggatgttagcatcctgccatctcttaacaaatacatcggcatctgtgagtcagtggcttggctctagatgatcaacactggaattcccctgatgggcatttgacttccatgctttcaggcgaccttgaagctctggactctgacacttctgtgttcccttgatacaatcttttgagcttggtcaagtccctgtggagttctagaggaaggggtgggttcagtgccatagccttccctatgcatcgtggtatggctgcttaaggggcatcaggcttcccttgagcatctatctgcgataggaaggatctaatttttcatgctgttatgaatcaaagaaattgagtcagaggaagatatttttgcttgtttctgcacagttatactctgctcttgctggaaggcatctttgaactctcttctacaaattcaatctacattttcatggctattttggctgtcagatgtgttctagaatacaaatgtcaaaatcccaactgtctctactatctgtactataaaagtcgttggccattttttatgcacatgtttttatttatttcagtgctatgtcgcagaagccatccagtcatggattggaagtacacagaccatactgggattgctagttttgctctggtttccgcaggagattcatgcttgtttgactcgtttaagggaattgaacggattcatatcccctaaccctacaggattagacccacatttgtctgacagtttctggcttagagatttctgttgatttgaaaatgtttcttggaaaacacttttgcatgttatgtaagagcgagttcctcagtggataagatgctggtgtgagtttggaagggggaagcactgcccctatcagaaggccaattcagcctggagtaccaggggactttccagcccttgacacttccctctgtgtgatagtctccttcatcttctacagcggtttggacataaatccctggcggactggtccctctggcaaataaaactaatgcatgtgccagctccatttctcttctgaagaccggtctgttcctgtacatgtgtctgtcccttcacacaaatctgtccttgcacacaagactgtccctgtacaagagtctgtccctgaacaccagtctgtgcttacacacaagtctgtccctgaataccaatcagtctcttcctgtgcaccagtctgtccctggtcatgagtttgcccctgtacaccagtccattcctgtacccctgcctgtcccttgctatcctttaccaggaaacctttaatactataattttggtgtccgttattctggctactcagactatttctggacataaaaaaccacacttgagtcagtcactcacagacccaggctctttcttttaacctcgcatggaccgaggcgtcacttcatgttaattaaagaactgcataaagtcacaaaggaacagtggccaactgctgtgggacaaagcatgggctgccattgacttggcctgtgttctgttgctttttggaatgactttctcttaagtcagacattgacttgcaagaaccagccacccagctgggtgggggaggggtagcagaagggttgtgtgccaggatcggagctttctggacagcagaggaactttgggtttcactttcctgcaggtttcctgcctctgtctgcactgtggtgagcaggccagtccccccccccaccccctgggaacaaggtgttaaaacatctatccttgcaagggagttttcatcccctccctttaacttacacttgcacttggctttttctttgttggattgtttctctctctgatctactcagctcagaatactacaaccttcctctttagattcttatctctgattaaaaaccaagaaacattccaagttctgaaaatcttcctcggtgtggaaatataaagttctgacagagaaaggaaatttttctcagccgtacatgctttggccaattctttgctgtgatctgacgtcgaagcctgtagtgaaaaaaacaccactttaaaaacccaagaacacacttcacgtcatgttaaatgcctgtggagtagaaatggtgtagcatcaggctgcacttgttctttcaaagggtcccatgtatcttcgtgtgtcccattctcaccacagttgatggctgctgtggggtctagagctcccagtgttttcacctttgaccctaagtgtgatggtttgtatatcaaccctaactaagacactaagaaaagacaacccccaactgtgaatgcatctcttttcggcctcacaagctcatgacttagaaaattgttacttgacctttttcccttactgcttttagtattctatctttatttagtgcatttgatgttctgattattatgtgtcgggaggaatttcttttctggtccagtctatttggagttctgtaggcttcttgtatgttcatatgcatctcattctttagatttgggaagttttcttcaataattttgttgaagatgtttgctggacctttgagttgaaaatcttcattctcatccactcctattatgaggaatggatacagaaaatgtggtacatctacacaatggagtactactcagctattaaaaagaatgaatttatgaaattcctagccaaatggatggacctggagagcatcatcctgagtgaggtaacacaatcacaaaggaactcacacaatatatactcactgataagtggatactagcccaaaacctaggatacccacgatataagatacaatttcctaaacacatgaaactcaagaaaaatgaagactgaagtgtggacactatgcccctccttagaagtgggaacaaaacacccatggaaggagttacagaaacaaagtatggagctgagatgaaaggatggaccatgtagagactgccatatccagggatccaccccataatcagcttccaaatgctgacaccattgcatacactagnnnnnnnnnnnnnnnnnnnnnnnnnnnnnnnnnnnnnnnnnnnnnnnnnnnnnnnnnnnnnnnnnnnnnnnnnnnnnnnnnnnnnnnnnnnnnnnnnnnnnnnnnnnnnnnnnnnnnnnnnnnnnnnnnnnnnnnnnnnnnnnnnnnnnnnnnnnnnnnnnnnnnnnnnnnnnnnnnnnnnnnnnnnnnnnnnnnnnnnnnnnnnnnnnnnnnnnnnnnnnnnnnnnnnnnnnnnnnnnnnnnnnnnnnnnnnnnnnnnnnnnnnnnnnnnnntgggggtgggtgggtaagggggacttttggtatagcattggaaatgtaaatgagctaaatacctaataaaaaatggaaaaaaaaaaaaaaagaaaattgttacctgcttagaggtgttgtcatcaaaatcatccaaactccaggttaacttggtctgagcaccagtgtaggttaactgtagagacctgctgccttctctgttgattgctttgagcccaagaaatgcagtgaggcgtctctgcatataggaattcctgggatttgcttccagatccctaaatgataccccaatcttgcagcaccgcctccaacattgcctttgagtctttagtgagtgtaaaggtgttggtccccctctaagccttccaccacctctgtcatctgctctgttgagttcacacatgggttttacttttctccatcagttgccttggcaactccaagagtagaagtgaaacacttacaggtttagtccaccacagaaagtatgtctcccaggcacgaaacatgctgggatctctcctaggatcatgcttttgctcccgcactcctctgggttctagctctttccaccatgcattctttgtggttattttgaagcccatagagttgctgacaggaagtggttttgatctgtgcaaatgggagttcctcagagttctgggaaagatgggtagtatcatatagggtttcattttgcccacgtactgtttaatacctgggggatggttttaggatgaaaaaccaatctatggaatttctcttctggaagcttcctgaatgctttggctgtaggatatcagggaaggtgataacacttcctcagcctcatggtgggctctcagtgggaccagtccacagcgccttgtccaggggctgactgctccagctctgaagacagcttgttttgttgagaggtccctctaatattctgaatattctctaaaagctctggggatttcaattgacccctcacaaaagctgaggcaaaaagttggtgatgcccttgctgctgataaaattcattgtcttttattctgcagacatttaccagtagccatgtgctaggcactgtgggatcaaaagagggtcacagatagccatgacagcaaagtaattattaatggtaaggtgttaaggtgggactctgtgtagaacaaacattggagtggctgtgtaggcaaaagcaaagctacattgtgatagtgcctgaatccccagagcttttagaaaacgttaaggatcctctgagccagaactttttcattcttgttgttttactgcatgctgataaggaataaatatatcccttatactgatactttaatgattaacacgagactgggaaaattcttatttgcagttcctggtctgaaaagatttcatgtttccattatcttaaaaactcaatttcaaattgataaggcaaaccaaaatagaattttctctccacaggaggaaaatgtatttttaagaccccttcactttactggtagtttgaggctttttgttgccttctcattggttttgaaggtgacctttaactgtgactagacttcctacatccaggaaagtcagcagtgctaaggatgtatgtggatttcttatgcagctcaaaggggctcacccaccttactctataacattagctcatgaaactgcttgttgcatggtgttctgctttcagaccctcacaggaagcctgtgtctgaacaattgaaagattgaagcaaactgcctggattcctttgccttctgtgtaggtatttctagtccatagctgtgtgggaaaagaggtgccctcattccagtaccagtctcaggccatggtcttgtaatgtttaagatgggcttggaccatgcagagaatagcagcaggcacagggctggtgtttagtaaacgtgcctggaatgtgagagggaatggaatgagctcaaatcctactcaatggcataaaaagaaaaaaaaaaatcatgtgcttcctggaggttgctgtgaattctctaagctccaaaatgtttgcttttctttctgcctctaaattgctccttctagcagccagtgaaatttcctgcctgtctcgtaaagctgcgctctctcagtcttgtatttggagacaaaacaaggtccttgcctaggtccttcacatacttgttcaagtaaggaaagaaaagagacaatatgcattcataagagccagttgtcacagagcagactcagtcaacgtttagggaggttctctttctttttttttcccccctgtggcagctgttggctttctaccgaatgcctttgcatttgacagtccctggacttattgaaacaaacaaaattgttgaaacgaacaagtcagggtcattgttgactcccatttaccctaacttgtggaccctgcaaggttacacgttctgggatgtttgattcccatgcaattttgactgtgctgcccagagatcgtggggcattcgaactaatgaacagaaaacacctgagtctgtgctttgtcaaacggactgagtttgcatggtgattctcagactgatcagtcttttacattgcttgctttgctaagcttctgtgagttgagttattgctgccttgtaagagatgtggaagatggtgccaaatgcctttttcacagagctatagcatccaatatgcacacgaggagcatggaccagtgccagcaccgtgagagcagccggtgccttccctttgttaacacaactattcatactgcttctgtggactcttctatactcaggagactttgcctttgttcaaattctgtaggtcttctttagaaaaaaaatgtagtactataaaatttactatgtttaaaaatagtttcctaggaggccagccgagctgacaaacccacggatgtgaatggggaggagaagagggtacattggactccatgtccaggcaggcaggactctttgactcccttacacagtctaggactttgaagtgaaaatgctttgaaccgcagcaacattgtaccgatggatgaactttagcaacattgtaccgatggttcaaccttcttttcaatttaaagttgctgatggaggctcaggaaatgtagcccatgacagcttcctgctactgaaatcaatgttataccgaatatttatcatatatctacttatgtatttgcataaataaggcaactatctcagatttttatcatccagtaggtcttattaaatggtatataatttttttattacattgttcacctagaggaatttttttctggctttgtagggggaaaaaaaccctatgtgacatcaggtcctttgtacttgatggggctctcatctgactttgaacacagcatgagggtgatttgacccatataatagccatgcagaaggacagctttcccaggaggtcagtcagagattattatgtctgtgtgtttctactcagcccgaggtgttcctttggagagatgtggcctgtgggggaatgcattaaattcaaaggttttcaaccagtatttgatagatttgggagtgcgttaagaaatggtaaaaaggagggaacatgcctaaaactcaggctagacagcatcctattatttgtggtagacactgactgccccgagtaaatgacctgagcttgtaccaagctctctcacagtacacatgactttccccttcagtggtacaggacaccttttgtcttgtataaacatattacctgcataggaaacaggaaaagagaatttttccttccctttgaaggaaacttcaaattcatgtggtcaaaattcctattagcaattagttgtatttgtttgctatatggtatcgagtttctagattgccctaaatgcttctgcattgaatatagagcttgttattaaaggaatttgaatacagtacttaggcctgcagacttgaccacaccctcttgtttctcaggatggtgtgccagtcctaacccctcagtgttgtccttggcactctgccccacagtaagaaggtctaggaggcttgctgctggcactgctgtgtgtctgcttcttggtaggagggtgattccaggcagttaactaagaggagcaagagccaggctttctcaggcttctcaagtagaaaaaggaggtcttgaacttgtcaccttgaatgctctgtctgctatgagctgcatgttttcctccatattcatcattaaacttaatcctcaccaaacaggcagggcttggaggtgaactcagaagtagatcataagggtcaagcctcataaaggatctctagttgacataagaaaagacagacccaaccccctccctctacatgatcacatctccacctnnnnnnnnnnnnnnnnnnnnnnnnnnnnnnnnnnnnnnnnnnnnnnnnnnnnnnnnnnnnnnnnnnnnnnnnnnnnnnnnnnnnnnnnnnnnnnnnnnnnnnnnnnnnnnnnnnnnnnnnnnnnnnnnnnnnnnnnnnnnnnnnnnnnnnnnnnnnnnnnnnnnnnnnnnnnnnnnnnnnnnnnnnnnnnnnnnnnnnnnnnnnnnnnnnnnnnntcctcctcctcctccttctcttcctctcattttacaagcagagtgaaggcaacacatggctctgatcagaagagtcagaaagaacatatccaacaccaggcgaactttgctaaagaaactttgttaaagagaaaactggaaaataactccatgttacattgaactttccacacttctcttagcaattgaagaagcccttggatgcctggaagttggccagaaatgaagggagggtcagccaaggaagagtgacaactgagaaccatattctaaggagcattgctctgtttcacaaagacacatcctacacatgatggaagcaactgagacatccaccttgcttaagatgcggccaagagttagatgtgctatgactctgtgaagggtgggggttggggtgcagctgtcagtgttgctcctcaggaagatcctgtcctgtttacatcagcctaaatgcttaaccaacctatgagttcttaaatcactcctcctaaaggggcttcacccctctgctggattccttgacagtgtgctatgaaagttgccacactttcttctaaattgaatcaatagtggcaaaaattaatgggtttcatccagaatgtgctggtcagtcattaaatgtctggtggctgcttggtgaactagagttcccagaggaaacataaaagagatagaaaaactgcacctgtcttaaacattctacaggtccatggggcttgagagaaggcttagccgtaaggaatactagctgctcttgcagaggacctgggcttgattcccagcaccaacacggtagctcacaaccatctgtaactgtagttcccatggaatccaacacccttttcttgccagggcaagaggcacacatgtggaacataaacacacatgcaggcaaaatacttgtgatatacttttaaaaagaagattctgcaaagttaaatggctaaacttaggggatatagtgagttaagatgttataaacaagaattaaagtgccttggattatgtttattccctttgaaagacaccaactagctgtacataactatatctggcccagcatccctaggaccagtgagaccttacaatatgttcttagcacacctctcactcttaccaatcccaaagtcaagaatgtcattgagtaacatctgaggtctgcaggaggcttgtcttcaacgttgctatgctttgctgcccctcagcccccaccacttattcagtaaatgctttggttaatggctttcttgtttatgtaactaaacatcttctataactatctactaagtggagagtggcaagtggatcatatttgactccagaataaaccatctctttctcccttccaggtgagaactgctttcttgctttgacaagttctttctgttgaatcttctcattatcatatatttgaattctcagatgctaacattcatgtttggcttggtcactgtgctataatttaaatgaaagttgcctagtctttgcttgtaaatggtgggattagccttcttcaggtggctttgttatttatttttttctgagttcatctgggtggctcatttgtcagtgaatcgtgtttctctatacttttcagtttgataactgtcgtcatgagagagaaaaggaacaaagacagccagtgtacagttctgccctattagggccagtgtctgaactcgagctacctcttcaggttcagctgcctgtccagtatgccgagtgcatcttggagatcctggcatgcgctttagctttgaacagaggacagggaggatgtaagagcactgtatcactcagcagctggtctctatttggtctccttggacactgcctcagcttcgtttctgtaaggtggtcctcagaagccatggttgcttgagggtcaaagttcccctcagctaataattgcttctgctccagagtgcagccttcctgacatccgggagagcattctgtcttatgaagtcttaacttttctttttgaatccacaaaaagtaaagatttaggtcaatgtctgatctctgtgccttcaagtaaaataagagacagacagtcacaaataaggacagagatgtctggcttctcccctacttttggttacctgaaggccaaagcagggagtcaaagatttctagcaaaagaaacttctaaatgcctgttgccatatgtgcttgagggaccttctagttgttaagccaaggatggtagaaaactgctattcttttgttaatcagaagtgactgccgttcagtacaacagatactcagatctaagtatactcagattccttagtatctcttctgtgtatcttcttgtaaggatgatacaatgttttgatgaacaaatgtccctatacaaaaaacggacttttcggctcccttttgggaaagatgtgggatatctgggagacaaattatgtcaaaaatgtcccaaacaatgggggaagagatggattggttgacatctaaatagaggaagaggttagttggcaaccaggtgggtggtttgtttgaatgacttccaggtagatggattaattggttgacatccaggtgaatgggtggataggttgacatctaagttgcatggattggttgtttaccaattgtatagctgatttgtttcatgcccatatggatggatatcagattggttgacactctatgcccccagagggtgacaccattttggaaatgcaagcatttctcttttccaagagctgcctgtagattttgttactgtcaaaacaaccatgtctggttatagtaatgagttttaatttcaagcaaaggttctgtgtattttattagtttatcacagacatctcctttgtttttaagactgggtcatagccttaatgtggaattctttataagaattactcttgggagctaaatttagctatgaatgtcaagaatataatgatttcattttcaaaggaattgtcctagtaatttaccttggcctatctaaaaacaatctgcttgataacaacaacaaattctcctctagctagtagtactttatagtgcagagggctgatatcagaatttatgagggaaaaaaaacccataatacacctgcattgtgtctctgaaatttgaaattttgaggagactgaactccatggtttcaaagtcttcagagacagtaacgcaaaggtgcgcgcacctgcttaccaaagccttcctgttctatggagttttaactactgactgttctgtgtctcttggccttgccttcctcatctgcctctccccagcaatgtttctatgagtgcttcccctcttggaatctcagaagggctaagggctgtcttataaacagccaccctgaatgtcagccagtggagagatctcttccctgctgaactcagggtgactctggtgatgggtaattatcaatttcagtttttcagattcctgggaactctggttttagatttgggggctggcttagagggttcttgttcctgatatagacggaaaagccttctgcagcagcgttcatacacaaccctgtatttactgaaggattcatatgcctgttagtgggcactatcactgcctacttgagttgatttctaacttcctcctctttactcccacacagctggtgaggtggttccagtgtgtgctccctcactcacccatccatcatacatatcctccccagaccatctggggtgctccctcccacctctaatggggtgctccctcccacccaaagccactacttttcctctcttccttgttgtcaccccacagcttcttctcacgggagtcttcacaatgtccccagcttctctataggctcctgaatgacactgatatgtttctggttccattggcccactctgtaaacaaacaatgtttcaacactgcattcttgtgctccaaaccagtgagagtgtaattcttttctttcagtagatagcattgaaaggacccagtccatgatcccagtcatccactgccatctgttttccttgcctccttactcctcagaaagcaggctaagcacctctaacacaccagccatgaaaaggtgactaggaggagctttctcctcccttttgtatccacccctggctgccttcttcctgcccttctggtcaatcctgagatactcagcaaaaacagcaggatgagcaccatcctgggtgaggaccctggactcatcaagaggtctagactgcaagggagcagaggagcctgccacccctggtcaataagtggtccctgtgctgtcaatggggaccggagtctctgaaggaaaaaaaaaccccacacttgttttgttcctagcaggtaggctaatatgtcatggtgctcaaggcagtgtgtgcttagtgcacactgtgggtgtgcaggctgtgggtcttgactctttggggatccaatgaccctttcaccggggttgccttagaccatgagaaaacacagatatttacattatgattcttagcaatagcaaaattacatttatgaagtagcaatgaaaatacttttatagttggatcaccacaacatgaagaactgtattaaagggtcacagcttatgaaggtcgagaaccactagctcagtggatcaggcctcctactggatgaagaagcgcttttcaggagcctcatttgaagtggtgaagtgcagtactaagccgagaacactagggggagatcagaggacttaaattgagcacagcccaagccaaaattaggctgtttttgtaggatgggaataccactccccccacccccttaaaatgtaaaaaagtgagatgtcagatgaagctacatatgcagcctgtatgtattcatgcggtttgcttttcttcctatttgtagggaatctaaactaaacttggtacaaatctttttctgattctaacaagcctcagagacccccaccctccatgagaaagtgtaggcctgacgctagatgcctgccaagaagggcgctgtggtgttaaagtctcaggaaacaaccctctatccttaagcagaatagaccagaaagaagtggcatgcacagttactaccctgcatacttgaaatgaacctctagggagaagctgaaagttatgtgggtgactccgtcactgtgatgcggtggaagttcctgtaggtgatgcatacactttggtcctctgggacaggctctgggtgttggctctttgcagataagatgggcttaggatagagtctaattcagagggatttggtgaggactaaagaagagaaagactatttaggaaggacttcatagtctagatcttggtgtgaaagtttcccacctttgttaactgtgtgatattgaccaactctaggttggttcatgtgaatgacccaacttcattaaagtccatcagctgtagtcatgcaccagatatttttctcattgctgtgacaaaattaaggaaaggctgtttgtatggttctagggttctagggttctagtggttgggaaagtgtggcattgggagtgtgagatagctagacaggttatatccagtcatggacacagacagatgaatggcagccactcaggtcgcgttttcctttttattcaacccatagggatgggatctcccacattagggtggatgttcttacttaccacctaacccaatctagaaactgcctcacagaggtttgtttccactgactgtaggtcctgtccggttgacaatcagtattagccaccacgcgccatttcctgtttgggggcccttctgataatcacactatactcaaattctgtgctcgggctgcactccagactcgctggggttttgtatattaggtggggcagaatgatttctgttacgtcacccctaccccctgccaccaacttttgttctgttggaaaagacaatgaggagcagtggaagctcatggccacccgtacagagcagggtcttccaggtgcccttcccacatgcaagggcggctgtgcatggaagctgtcagcatctgaaactcagccacactgctttgcaacacccagtaaatccgagttttctatttgctcggctccggtcttcctcaaattgttgaatctggcagaagctctgataagcaaaagatcctgacaaagaagaggtgaccttgaggcggagtagaagcaagcaaacaagaccaataggggtgaattaaaggatgctagaaaaccgtcaagactgatttttttgttttgtttgtctccacagccaccttgcctttaagacagcattttttctcctccagacaaagggaagtctcctggaagtcaatttccagacacatccataaaaaattcagttgagtcactttaatggacgagaggacaggagtcagggaggttgtccacacacacacacacacacacacacacacacacacacacacacacaaagctgtaataagttaagtgatggattctaatatgaactttaaaaattaaagatatccattacatattacatatatcactttggaaaaaattgtctctatctggaagaagtgtcatgtcaagattgagcactgtacgccaaggtgcccatggcagtgtgaaacagaggcccttcctgcatgcagccgccacagcctaaagcaggcagtgctttgactattgttccagccttgttccatcatagggaggaggcaaataaaaagacttaggatatcgcccactcagtgaatcaaattaatcatttagcaaagttttaaagggaagccactctgaaggaaatgagacagaaatgaatttagaactatcaaaacctgacatgtagccagtgttggagttggttcaatttaaaaagtcagaacaactatacgttttgccatctgcctcaccaagggccttttaaaatctgaatactaccatccgtagagactcacatgtaaggaggctttgctttcccgaaggccatctaaagaacataaaaccagaataaataatgttggggcttgtccaggaatacagttagtaattaggaactgtagaaaagatatatcacgtctgctgtgtggtgagtccaaacgtcctgtctgctactagagtaaaacctcacataaaacctcacactttcccagactacagcttccttcccacacaacggggagtgtggttttgggtttgctgatgcttagagaaagcaggtaaataagttactcaccatcttccagtctgcaaacagaagcgctgtggactaaaaccacagctccaaactgtggaaagaggcacatttattgctaataatggccaagaacatgaaagaaataactctgccaacttcttaacttctagactcatgtgcaggtgggctgcattgaggaagataacatgcccacaaatagatctttcctttccttccctgtacattagcataagggtgttctcgaagacacgttggtctgttggatgcttcctccataggacacaggactgatgttgtcctggttgctcattcaggcaattcttcttgacccttggcacacttgctttgaccgctggttctcacaaccccattgtgagcatgcccagcgaggaaatgaattccggagatcggagggatcctcgtgacataaaggaaggcacaggacaacatgctggcagtgtccaggagtgttgactgcttatagcacatgtcgttgaagttgacctctgtaaacaaagatcacattctcttggaatagaatgctcctgtgtagatctgtgtagctaggctctgtgatctacatagagatacttccttttagaaaatgctaactaaaggtcattttattaagaacactgagcatgggtcaaataatgcactggtctttaccaaaatggggtccacaggaggtatccaagcaaacactaggagataaagtagtggtgctcagatggtatccaaaagaaggatgctcgggggaaggatttctgagtatcatgtgtggaggggagatcaggttaggtgctaatgtgtcaccccgctctccatatacaatgtcactcacctctgcaggctggacatcaacaagggtgaaggctggcacctgaaaaatgctcctgctcctctgtttctgagcttgacctgctaagtaaggaagggactgggaagggctagtgcttgtgtgagcttcgtctgtgagccgcaccggagcacagcttgcagagaatgtcaccacggggagagggaggttattcttacatagtgactgtgaaacagaaaaacagcacacagcctgggaaggttgtgaagccacccggcgacggctgcagctgtaaaatgatgcctgtggcctggacaggtagatttgcaatgagtacctgtgcactcaaacagaagcaacacaaatgtctgaatcaacagtctgaaagtttaatcagattcgttaaaataattgtttttagctcttaccgaagatagtagggcacatttgtgtgtctgtggaaatctacataatctttctggatgtgacatcctccttgagcaagcattggatgtatgcaaatgagagactttgtctcaatgtgtcctcatttctcaatatgcttgacacattccaaaactcatcttgacttcttccctgttttccattcttgacatccaactggtttccatgccctgagttttgtttctgtcagttcaggaaaaaatgaaaagcaaaaatacctccaaaccagagcaccacagttggagagaagggcaccaagccctcaaagcaccctgtcacagcgtcccaaacacaaggatggcattctaggatgctgacagaagtcaatgaggagacaggtatggaacaatgtgctagtaaatcaaatgtagagaaatttgaaagggtttattcaccagatttacccagactgtactattggttcgacttataaaaatcaattaattcagtacactgggttaatgtaaaaagacacaaaaggcttgctgtcaccctcaaagaatagtaaaacatggtaagacctaacccatttacatttttgaaaagacatttttttaaaaaaatgagatttttacctggtgagtcttcacttctaagaccagaatttgacaggactactcaccagggctgctcgcagagcactttagaaggcaacaaaagagattcagattagaaagtaagaaaaggaaaaagtctattctcagcatgatctcacatcacacacatgcatacacacatacagacaattatacacacacacatacacacacacatatatacacacatacagatacctacacacacatatacccacacatatatacacatgtacagacacacacacacacacacacacacacacacacacacacacacacaggaactaaaaatgagtatctaaccttactggatatgtgaccaatgacagaagacacatttctgtaaccagcattaaacaatcacaagtcaatttaaggaaccactgcatttacaaatagcatccaatatagtaaactacttataaaaactttcaatcaaagaaacacaaattttgtacctgtaaaacaagaaaatactgttgaagaagttaaggacgtcctaaacaaccaaagcacactgttcctggattgaatggtttcctgttgcacagagggcagtggtccctggactgagtcacagaacatgtgcaatctctcttaaggacacagttggtttgcttgttttggtttgtttgttgtgtagaaatggatgatctgagcttaagataaatatttaagtgtaaactgtccacactaggcaagacaattataaaaagaaaagaaaaacaaaggagcaagatgtcacaattccaaaactgctacaaagccacagtaagtcaagacagtgtggcaccagctttagactagatacacagattaatggagaacaagagacagtccagaagtaacccgtcagttatggtcagtcagctgttctccagaggctccaacactcttcaatggggaaagaagagtctttgaaacaatgagtcctgggaaagcaggagaccgtgcacacaggaatgaaggccttacagcagacagacaggctgcctgggacagatcatggaactaaagtgctaacaccaccagagtctttctgtacaggggagcacatctctgcaatctgggatttggcaaagattttatatctgacaccaacaggagagacacacatgagcactgacccatctaactgtgtcatacataacccaaagtgttgtttcctgcgagtcactgtaaagaccccaaagcacaagttcttctccaggataaagtgttctttaacccaataacaatggagacagacccttatgaaggctggagaacccagctaacctgtacttacacacacacacacacacacacacacacacacacacacgcacgcgcgcacactcaaaacttagatgattaaggaaaggctaatgaaaagtaagagggcactccatcatgttttccacaagcctaaagaccaaaaagttagagaacagcgtgtattgctgggggcaaaagtgatttgaaccccagtactggtgtgattgtggtaaaatagtacacccactctggagggagtttgtcagttctgcaacatgttaactgtaaagttattgtaggacccaaaaatgtcgtctccggaggatggaggtggcagaacggagagcatattcctgttcagaagcatgctcagtaactcaccgcaaccttcagtatattcacgacagcaaaacagatcagccatagaagccaaaagcatggaagcagcacccatgctcacacatgaaaagaagcagaaaaaatatagcacacccataaactctcatatcaccttaaagagaaatggcattgattccagtcgcaaagtggatgaaacacagaaaaaattggtctggaaaagttcaaatgcaggcaaccatacagggtgagactcaatcatgaaccagagcttgggaatccaaagatactgaaacagatgggagaatgcagtggcagtagagtgtcccagctgctgcttgtacatagcctcatccactgctctctgtctgcagcctagccagtccattccactgggaagcacacgagctttagtcctggctctcttgctttgcaaggaaagacgctcccttggtcttccttgctcagttctaagacatcctctgggttgtaaaatgtaattgctctgtcttcttgtaccttgcttgtgagtgtgcttgctttttagctgatggtgtgcatggctgcctaccttcctccaagacagttctttgaagatgcaatgcatgcatgtaaaaaaaattcttgagaaggttttactatatagcactagctggcctgcagctgactatgtagactaggctggctttgacctcagaatgacctgcctgcctctgtctcctaagctccgtggtttaggtgtgtcctatatgaccagcaaagcacatatttttatcatctcaaccaagtcagctttagaagcagtattgcacacagtggtccttcaggagccacataagttgagttataacttcaattgaaagttgtgtatgtgatcagtattaaaaatgaaggttgttcattccctacgttttatgtctaagtaacaaaactagtttgtaatcacttggaacagcatgtgtgttctgagctcagtgtgaccaagtctgtcctagacatttcaagtaaagctctatgctgcatgcttggtcaccgaggaagcaggagggcactgtctgtattgtgttgttagcatctcttatccattggtgatgagtcctgggaggatcaggtccagggcactgtcctcactgtctttaccctgtgaggttatctgtccaggacctaatgtaattacttcctgctcaaaactcaaagcagactcagcttcactatagtttaagaatttcttattcccttgaggaagttttcaggattcatcaagaactcaagcaagagaagcagcagaaagaagggaggtgttcaggtctggacatcacattcattatgtccaaacagcatgtggtgaaaaacaagataggaagagaggaagagtgctgtgtagagtggacctgttaagaaaacttgaacattaattgtgcactttatacagataagccatttactgattaggcaaccttgtgctaggatgtgaagggtcaatgatgacttgtctgtgtgcaaagattggtgggaaacaaattcccagaactaaaatgatgtacagtagcaaacaggaatgtatggtcctgtgaacagataaagtttgttgagaaatgtgaaagccccttcctccctctgtcttggtctttgccgcatgtctggttggtattcctatgtgatctctaccttgggactgggttattgatttttgctggcacattctctacccacagcttaagtacctgtcacaacattcatagctgtagtatctgtgaactgttgattcaaactgtccatcaactgtgatgacttcccccttaagagcagtggaaactcagagaactcacccttgcaatgcttgtctgacaatgtgagaagcaacctcaatcctccctgtgtaagctcaactcttccctctctactccctggcccaacaactctgttccttccatttttctctcacagcagcttgaaccttatcatccagttttggttacttatatataagcatagattctcaggatcaaagtatgaaagacctataagactttattgtgctaggtctgcctcagagactggtacaccattgatgtgggtccatggaccacaggaactcaggcattctctgttgttaattctccttttccttttacacatcctttagatttaggtgagatgattatttcagcaaggtatttccagaccccaggcatggaaagagttgttcatgtgttaatctttgagcatagctttcctattgcaattcctgttgttttcttcttgttaatgcttaaacattttccttgagtcaaaagccattgagggaggtggctctgagttttgctgggctgtggttgtaattctgtgcatagaactctgcctcgtgggacacgttcttaaaagaacataaaaggaaatcaagaaaacatttccaagacatccagcaatttcttcaacactacagagatgtatcagagtactctgcatttaccacagcagtggatggagatccttcagagaccgaggacaaggctttctaagtccctgttactcaagttttattctatcatgcatctatcaggcatgtcgtctagactcaccatatctaaagaacaatttgctgtctttcccagcttcctcctcttacactgtgagccagtgggtgacctcatcctatctgaacctcttcagaactcagtcaccagactatcatagtgatgattcctattgtggcaaaacaccatgaacaaagcagcttggagaagaaagggtttactttatcttaacaactctcatgtctgcttcagcattgagggaagtcggggcagaaactcaaaataggatcctggagtcaggatctggagaggccacagagtagtgctgttaactggcttacccctcatggttcactcggcctgcattcttactcaattcagggccaccttcccagggctagccctactcacagcaggctggggcttctcccatcaatcaagaataaagaaaatgcccaacagccttgcctgcaggccaaagtggtgggagcattttatcaattgaggtttcccttctcaaaagactctagccagcaacaagatgccaactagccaagatacatactttctcttttcttttctcacaacacatccctttcctccaccatggaaatctcaaagccaccatttggtgagaatccattcagttcgccgcatcctcagcactgtgatggtttcaagcccacattactcatcttcagcttgaactaaaatgagagctttcatgttgcttccttgctggctacctcatctcaagatggaccattcatgactgccaccatcttactgataggtgatacccatctgctacaagaaatgtcctcatatttcagacagggggccctttgacagtctatggccccttgcatagtttgtaggtatgcccccggaaagctggcctaggcagtaaagttctagactacacagatagtgtcattcatggtcaaaccctgtcttctccaaaactcccgttttagctgtttcttgtgtgccacatagatgttcaagaatccctgtggatgcatagtacccttgctaggatactactgccaacagtagtgctttctcctgcctctgatgtgcctgcttcacagaggtatgtgcatcaattcaactcttccattggccatagtaacctatttatcattcctggaaatgtctgtctccgtgtatgtgcatctgtgagtgaacaaaagaatgtgtgagaaactaataccctcgagctacctatctcgcacatctttgagaatttttctccatcagtgctatatgagaatatcacattttataatacaaagaataattaatgttgcttggtcaggaaagtgccatccaagtacaggtttatggagtcctatctcaagagaccatattataaaagccatacctgtggcacatacctataatcccaatgctgggtaagagaagacaggagcatctttagagtttctgggcctggaagtctaggccaactcatgaccaccatgttcagtgagagaacctgctccaagattaagctgatgatcaactaggaagaggacccttgacaacacttagtgtagatgcttgcataccccgcaacacaactgaaacagtgacacacattgtgtgtgcaggaatgtggcagcacagctcaacaaatcttaatcttacatattttgaccagctctcaccccctagatcagaaaacaagacagtttctttgttcttggagctttcctcatgatgactttttttttaaaaaaatgccaatcatctatatttttttttcctgctaccataaatcttgaacttcacacaggtgaacgaggtcataaatgtaacactctcagaatatctcccctcaggtccctttgagatttttagctcagggagattttcttcacagctgttacagttattctcctttgaaacacataattaacacctgcaagtggggtgttatctgtggcctccatggaagtgtgggagaagtgaatctaacacaaatagcttagacataattgttaatgggcatagcaatattctgaaaaaattattactgcggatatattagatagaagccaaatcccattcttctgcacacattagaatcccatacataaaaatttgctgttatttccttactgagtcttacttcctgtctataagtcttcttgttgttgcttgagatgggatctcaatatgaaagctctggctagcccgaaatctgtatgtagacaagggtgacctaaaacagagatccatcttcttctgtcttccaagcagagtttaaagatggtcagtaccatgctgagcccatttgtaagtcttctattaatacttcctttctctctataattatgacggcctggctcgccatgttgcaatgttcaatgtgggttgggtaagctgcactgtccactctgatggacactcaaaggtggcaaagtaaacatcacagtatcggcacctcactggcatttcagaagaagcccacctgatgcatacatacactgtatatatgtatgcatgtgtatacatgtatgcatgtatacatgtatgtatacatgtgtgtatgcatgtgtgtatgcatgtatgtaatttaggatatataaccagggacagcaaatgataagctagtaccatgaacctaatcacagaagaaaggaacaggaaggggacagatgttgtttgtcttccttccacccttgaatcctgattgtcctactgtctgtggtcatcttctttcctgcatatgttctgtatccatgtttttgtcttgtctctctgcacttgtgtataataggaagcattgtggttcaccaagcacagtcaggcaagaagtgtggtaaacaagaaaagaaggcaataatgaaccttgcagacataagtggatgtcagcagttacagcacacgagacatgtaatatccaaaagtccttttaaaaatggcattagtgactgaggggatgtgggaatcctcctgggacaacgtggcccctgtgatgggaacttcatggtgatctggtcttgctcttccatgcctgaataatcacacatgttgcttagtcttcaagcttcagttccttctttacagacgaaagagtaatagtgctctctgtttcactctattatgaggattagctgagtggatacttaagatgtggttaaaataatgcctggcacattggaattgctcctcgtttatggcatatagttaggcttacctggtgcaggcagaattaacacatgactattgtttgtctttaaaattgttaaagcatcaaaggctttaagtagagaggaaaggaggtgcagaggagtgggcagggaagcagagggaggagaaagtagaactgagtagagggcgactaacagaaaacgcaaagcccaggtcatggccaggactttgaaaacagcattcctgccttgctgtaggacagtctactcctcacagagcagggcattgagatccagacgctgccctgggtgggtggtgggattgaacctcggaagagccactgcatcagaagactgcaaacctttgcaagtggctggcacatcaatctacccactgaggtgggaggagagagggagagacggggagaggaaggcagagggagacagatattttcaggcctaatcagctttgggaagacagttcttcatgcctcaaggtaaaacaccatcttgtcttccaaggctggttttccacacgatcaatcagagctccttgacctgctgacgccacaacatagacagaaagagccatgccacatatagagcattgaatcacactaagtactaatcccactagattctaaggactatgaccccatcaataagaactaagggctaatctgaaaagcttcacactttgaggaaacagataaacatcattttcaaattcagatgatccctgctacatttctttttctaggtcctttaaaatgttattacattttggggacctccttggagctcacacttcatccagggtagcccatgggggaatctgctgctggggaactcatttagaagttaaactcaccctccacctccctgtgagtcagttgaaggagactttctgcccagtgttaaagtcagataagctcggtcggcttgcttcatagctactcccatgattcatagctacttccatgattcatagctactcccgtgacacagaggacctttcctcctcacccctcttctcctttgctcctgacagctacaaatcccacaggatcaagtgtcctgtcatctgcctttagtaacataccccaaggccccagtagcataccctagaggaaattggcaccatcagttctttgtagctctttccctgtgacctggttgttcagtgatagtttacacttttctggaaataaggacacctcaaggttttagcttcaaataatccctagcaagaaaaaggcttccatgtgataccaagaaacatgcaaagcactgtactgaaacactgagttgattgatccaagggaaaaataaataaatacaggattgctagaatcctgagatgcacttaagctaagggcatgtgttaaaggggcttaatataaatctgaatgatttgtagaaattgactaagtaaatttgtgtgtatgttggcaagcacatggttaattaaattaagactaatagaaaaggcatcactagacaggtgcactggcatgcatcttcgattcttccagcacctggagaaaaagataggaacagttgaggccagccaggttcccacagtaagtgtgtgtatgtgtgtgtgtgtacatgtgcatatgttcacatatatgttcacatatatgttcacatatatatatgaacaaacagacatgtatattctacagttcaatatatatcagagaaatattactacatttctatatgcaactacttcaaaatttatcttcttttaagaaaatttgtattattttcagtaagtagactactgttgttttgggggtttttagctgtattttttgttttgttttcttttttcttttgtttctcagaatgagtgaagagacagagaacatccagtggcgctttgcttgcccacatggtacacacgcgcatgcgtgcacacacaggcaccaacatacactaatgctactcctctctaactcactgtagtataagcaaacgtggggtcaattcaaactttagtgagagggacagtgaggtgttcctcttggttcattctaacacacatgctacagtgatttccaagtttgttttgatatttaagtgtgtgtgggggggaggccttacaagtgttttgcctagatactagagaagatgcaaagcatttcatttccattagaggagaaagactcgagaggcatgtggatgatcagatgtccagaatgaacaaaactaacatatagcaagtacctggggctcccatgtcctcaccaaagcaaatataacatgtgttgcttcttaaggagcaaccatgagccttgactaaagccgtgattgcaggcaagcttgggacctcacccaaccagaagcttttgatgctggtgataggaaggttgaacatgcatttcccagatatgttggtaatggtggtgttcaacaggtttgtcgcatgtctttatcaatgagtgaagccacagtctgtttctggacttgtgacaagatgtgcctgtcccagagtttggattcgcaatctgccagttgtgtgcagttcatatcttcatttggtggtgatagtggtgtagcctgctgaattagaggtttttcctgttccttagacaaaagaaacttaagagaggaagggatgcctgagcttggggataagaggctgtaatccatcatggtgggaagggcctggtgacaacgctgactagctgtgtcagtagaggcctgagaaagttgcattgacatcaagcagcagagaatggaatgctggtcttcagtttgcctcctttttcctttcattccacacgatggtgacattgccactcaaagtgggtcttccctcctcagttaaactactctctggaaatgcctttatagagatgtggagctgtgtcttctaggtttatctacaccatgccaagatgaccatcacactgactaagcacacaggttatcactattgagggcctcagtctttaattccatcattgagtattatgtgaaaatccatacactattagatttggaattatctatcaaaaggctggaaaactggatctcatcttgtgggcgtgtgccttgggttgtacatagannnnnnnnnnnnnnnnnnnnnnnnnnnnnnnnnnnnnnnnnnnnnnnnnnnnnnnnnnnnnnnnnnnnnnnnnnnnnnnnnnnnnnnnnnnnnnnnnnnnnnnnnnnnnnnnnnnnnnnnnnnnnnnnnnnnnnnnnnnnnnnnnnnnnnnnnnnnnnnnnnnnnnnnnnnnnnnnnnnnnnnnnnnnnnnnnnnnnnnnnnnnnnnnnnnnnnnnnnnnnnnnnnnnnnnnnnnnnnnnnnnnnnnnnnnnnnnnnnnnnnnnnnnnnnnnnnnnnnnnnnnnnnnnnnnnnnnnnnnnnnnnnnnnnnnnnnnnnnnnnnnnnnnnnnnnnnnnnnnnnnnnnnnnnnnnnnnnnnnnnnnnnnnnnnnnnnnnnnnnnnnnnnnnnnnnnnnnnnnnnnnnnnnnnnnnnnnnnnnnnnnnnnnnnnnnnnnnnnnnnnnnnnnnnnnnnnnnnnnnnnnnnnnnnnnnnnnnnnnnnnnnnnnnnnnnnnnnnnnnnnnnnnnnnnnnnnnnnnnnnnnnnnnnnnnnnnnnnnnnnnnnnnnnnnnnnnnnnnnnnnnnnnnnnnnnnnnnnnnnnnnnnnnnnnnnnntgttgagtgcttgtcagacttttgcttaagttgggggaataatctagcttacttgaaaattgtctggtgtgcaataatgattacatttaaaagaaaaaaaaaaccagaacgtgtttgtataagaaattgtgtgaacagcgagcatgtttgatgcataacaaatgaatagtgctttctcaaatattcttgatatcttcactgacaacgatagggtgtcgtaaagatgctgcagaataataaaataactgctttattagttgtaaagtttcctggcaatggaaaacaactcctccttccaaatgcatgtatttaatgttgtgcttaatgaccaattccacggcgtaaatgagtttctaggaaatgtatccattccagtctcagctctgccttaccgctatcatcaaatctgatactgtccctaaaatatgtgattcaaagagctatgatgtggtctgtgtaatccctaccagagctggatttcataggaaagatatatttccagaaatgtaataaaatttaaatcatcctttgttccattttatgaaagttaatggagtccaatctattttcccaccatagtcacacttgaataaggaactagtgcttgtttggtagtgataggaaaataaaaatatatctctttttggctgtgcatgttcccataggtttataaaatgagcataaagtttaaaagtcaaatataagaaccccccccccgcccgccccagagtgtgtgaaagtgaaatgtacacacagctcgaacacaggtcatgctcagttcatgtacatgtcatgtatgaaggagagtgaacatcttcacactgtgtgtattcatctctgtttcctcatagtggctgtgttgctcctccacacagtttccgggcccttccctcccttgtgctgtttcccaggcactgtgatgcattagatttctgtgaatctgcatttcaccagtgagcaccttgggggcagggacacactttgatagatcaccagggactagtcagtcatcaactttcagtaacgtcttcttggacttatcctattcattttaaggagtgaaccatgtactgtagaactaggggtcatagatgcaggctgattgtgtgcattcagaggcttgaaaatacagacactagaaattcatgtacagggagggacgcagcccattgtctacccgtcactgtgttaaaatgggaggtgggctgtctgagtggcagaatgctccctgaagagataggacactggtccagtgagtgcagaatcactgtgaatatggagacttgcactgacttcaaggaaggagccttgcacttgacggtcaataagaggtatgcacaattgtctactgacttactggaacattgaaaataacccaaagaatgttgtaaaataagctaagctacccttaactataaatagtgcatttacgaccttttaaagacatatttttattcctgaaaaatcacctaacctgttacaggtcatgggtgataagagtgctataattattgaatggatggataatgaagaaaccattttttaagagaaagtctccttcctaatccttatggcagttaaagtgtggacagggtcatttgatgcgtagtaaaatatcttccttcttgttaattctagtactcacttcaaacaccaaaaatccaaccaatggttttacatcttatttctaaactagatagcaggggttagggacttcactttctacctataaatgggaggtacaattctgtctaaaatggaactctggaaagcggtagaatctgaatttgaactttgatgggggaaatgtgacagagtgtgttgggaccctgtgctttgaagtgcatccatgaccctcgctatgcagatttggctcttgtaatcttacttaataaagactccagactcactaagttgtatttattaggggacccaggatttatgctccaccacagaatggtgtgaccctgtactacttaatccactttgcattctcaatgccttcaaatctgaaacagaatttggctacactttcaaagaagattatcataaaaatatactaccttgccgccaccgggtctttactgtaggttgcagagtccctagctaggtgatcattacctctttcctccatagtgccttccaattgaggtgctagtcagtcgaggtgaagcttccagatgagtgccaggtcggtctctccatgttctatgacataagtaggtgctatcttcagccataggctctcaccttcagcttgtggagggcgacccataatgttgacgataccctgtaatggcattgatcaaaggaaactgttgaccaatgaccaatgatactgatatccagccagagtattgtcccaaagattatacagtaactcaaattaaactgggagagggaaagtcagttttcattagggtgtaacactgagtatatcaaccatactccagggcagaccagatattaaaggtagttaaccaacacaaattggactctagttctttctttctttcttttctctctctttttttttaagaaagggcataaagttgagcaggtggggagttgggggaaggagaaaaatacaatgaaaatatgctgcatgaaattgtaaaagaataaataaaaaatattgttaaaaataaaaatgcattaacttaaaaagtaactacttgctcctcctcatttgcaagtgacttacatatgactctttccggctaactagctattaaaatttgatatttatctccattgaaatagagtctgggagaccatgtgtttcgttctgattgcaacccaggcaaactttattctctggcttaggttgtgcagtttaattcattgcaatttgcagaggtagcaaaatcctaaattttagagctgtgcaaatcaacacatttctgtgggtaatttaaattttgcattctgcatagataaccaaaaagatcccttgtgagaatgcttcctggctagaggcagatcaaagcgccctcgtcttaagagggggctattttcagctcctgctgtccatttagtattcccgaacagcaactggtggcaactaaaaataaggagcttggccaccagctaagaattcagtcctacgggcagtgctccgggagtaccggcgagatcctggatgccttgtgcagcatcaccctcctgcccactcatcagtgtagtcttctgcattttgaaagctattgagaagccattagcaggcaggaccgggagggagagccgcactgcagcacacctccacgctagtggcaggctgtagccgcacgcacgtgagtgccaattagagcgacccttcccaggactgtggcgctggaatgtgtcaatcaagggcgctgggctagcacgtgcagcgcagtggctcagacccaccctgggggctgctctgaactccagctgctgaatgaaaatgagctgctgctctttgcaagatcatgaaggggagcctctgttcagtagtgcattctgaggtacaccgttacctgagcggggaccctaaattatgcattttctggagacaacagtcatagctgaagagaatgctgggacccacggcaggatccgagcctgagaagggacaatgtctcagtatcattttatcaagtactgtaagtaggctctctgacctgtgtgtgtgtgtctcttttaaagtgttactttaaacatatgccagaattaaggcatatctgtggtgtgtggcatccagacagttaaaatgcattggtaactgtgaagggcaattgacaggcatgatccatttcatgtcagattctgaaataattctctttttatctaaatgctgtagtgtgaaaaatctttaaaatgctgttttttttttttttttaaacacgggataccagaaatcgagaaagaaaagaaattaatacacaaaagttgtttaaggatttctacactattgaggtatttgggtgatgtttgtacaacttccttggctgaggctggatttcatgatagatctcactcactcactctagagtttcactgctgcggtatcattccgggttttccttcccagtctttctaggttgcccttggctgggaacttttgtccttgtgccgttcaccttgcagagactctgcacccacgctctgcaccggtgctcagatggtgcagactagtcagctagcagctcttcccgtggctttccttaatactgggattgcagcagggtgctcccagctagacactacttgcacctaaaccttctttgatagtgacaaggactgagaggacatattgatagcaaaactggcttgttggatagaattttcttctctgagagctcttttggaaacttctgcacattaatatcatgatctttaagggatgggtggcattgctgcggggacagatttctggtaagattatggtttgctagcaaggacacaccaatgttaaccaagcaccttgtcgaagggatgcggtttaaatggctcttgaattttgtcctaaaggagactggaaaaaaatatgtttgagaagaaaataattgtcttggtcttatatttttgttggataatagacaagagagggatagcccgtgattcttaaaacaaaaatgcctagtttagaagccttgtttccagagccaagaaagatcacactgatcagcctgggtgtttggaagttaactctttaactgatgaacattgtgtgactgcagtatgtattcaaaacgtggagttttcttcggcttaaccccctaaagtctcaatgtgactgacccggtaacacacatcgtgcaacaacctggctgggtttcagacagccactcacgttgtactgcactggtagggtgctgtcatgctcctgtctggctttcccagagggaattccccaaaccctctgcatcatttcagagagcctggctcagtcctgaagatgatcacgcctcctctggggggtgtagccatggaaggtgggcaggagctcagtgggttgtggtacttaagacctggtgtggccagacattatgtgaggctaactcctcctgcctcctctcacctctgttaagtgtatgattaactagaagctcagaccctagatagaggcagtgggtacatggaacggaatacttcaggcaagtcttaccattggtcaccgtaagagatgaaagcagagttaataaatttaatgaattaataatggtcgttaatgaaaatgtttcaaatgcttagggaaagcattcccaatgagttcaccaaagcaattaggaagtgcttacttgtgattcacccatttcccgagctattaatggtaaaatgggactgccctccagttccagcctctgctgtggactttagaagttaggtttcccggtggctgaagccaccaagggatgtctcctgtcaaagatttgtggggtgtagaggctttgaaatgactagaatacggagagtggtgaggcggctttattgatgtgaccacagttcattgtgtgggtgttacacctgatgcctccacactgacatacccctcaccctcctctaaggcgtcctttgcattcagtcccaactgtgttcaccttcaaagccaagctgtggtgcaagaagtgagcagactcctgggcagaagcaagaagttttggctgccttacctcagcatgtcacatgggctccatgagactgaggaagccattgggcagagggttggatggccagtcattcgtgctcaaggagacccctcagtcacccaggggagtattcagtttaatgataaatcatgcagtctgaagggtctctcttcaatctaaaggtaggttgagtactattttcagaaattgttattattttttttaatgctgcacttagtgaacaagagagagcctagtggttaaagtgtttatcactcttacagagatcccatattgtcccctatgttgagaggcttacaccagcctatgccttcacctccagggcttctgacatcctcttctggcctctgcaggcacccacactcatttgcacacacccacacatagacagacatgcaaacacataattaaaaataaaataagtcttaagagaaaacaaaacaatgtcagcagtgttagggttttaccatcagaaaaagaaacctgccaggcagtgtgagcagatgttcaggaaggtaaatagtctcagacatttttctcccccgatgttctctttgatatgagaatggatctcattttgcacacccaatacagcttacatgtctaaaactacaacaaattttttgttacggtgataagagtcagcagggaagtttcagaagacctctaggagaaatgctggtagtgaaggtgcctgtggtcaaaagggtgcttcagatagacccacctcatgctgtgcctcgggctggggatcaggaggatgttcattatgcttggtcactagcatctatgactagattctgctctcagcaggaaggagaagtggatttggggactacagaccccagttttactacaacacgagtagctaactagactcctgctttctctttaactgaagggagcagaagcatgccccgtgtgcttctccaatctcccatctggggccaagctggctccctgtgactttctcctggtcagcccctccctaagcatcaggactcaaggtggtcccacctatgataggacaaaggtgaaagttctccaggctaccgagttatcaaagcagcccgatctgagctaaaagtgtccacatagaacaaggctgcttcctattgcccagtccctggttctcacaagtgacctctaccaagtgtctgccctatacttctccccactgaacacttggctcactgtccaggagcctctgggcagggatgctcctgttcttgcctcacagagccctggcctggtcatcatcactggcccctcacccattccccaagccacacctatgaagtcatacaggtctttgtccccattactctgtttctcttaagggacaagagaatgtcttgcaaatggtggtggggtgctgggtgatcagtttctggtggtgataggatgaccagttgataggggtgttgggttgatcagttggtggggtgttggagtgatcagttggtggggtgttggagtgatcagttggtggggtgttggagtgatcagtcagtggggtgttggagtgatcagttggtggggtgttggagtgatcagttgctggcatggtgggatgatcagttggtggggtgttggggtgatcagttggtgaggtggtgggtgatcagtgaggacagactgattgatgttgcggttgcacgtctccaacatgcaggtgggcattgccaccacagccttggcacctcttcctagcaggcacatggttgcttcctggattccctcgttagccttcagtctgcacaatgggaacagctactgttaagcctacacaggtgtttgagtatgaaattctttttgaagacttctcttctgtaatagtgaatttgcttcctaggaccaaagccattgtgtacctgatctgtctgcatatagctaataacagaggccaaagggcctggagttacagacagttgtgagaaaccatgtgggtggtgggaatagacctgcatcctctagaagagcaaccagtgctctcaacactgagccatctctccagcctcagactcttctcttttcgactacctgtgatgatgaccaaactgtaactctatatttactctcatgggtttgggttaatttgttgccttgtggtatagtgatgagtgttttacatcttttcgaaaactttgatctttatagttaaaatattttataatattaaggtgcatatatgataagaagctaggtttgccacttactcgtcttctttttcttccctcacgatatactctttgaaatcatccctctttattccattttaaatgcccaagagtctttacacattggttttggtcactcatcagagcacactggtttggccactggagtggcagtgaattttgatatttggaagccaaatcctcagtaggcagtctcttcactttctttgatactctgaaatactttcccctaaatatttcaaaagttttagccaacacaaaacacactctatgtttttgttttgtttttagtgtgtgtgtttgcatgtgtgtatgtgtgtgcacacactatatttggttttaagtattgtgtttattttcatcttttaaggagagggaaaagaatataaagttggatgggtagagggtaggatttggtacaaagaggtttattaaataataaacacaattataagtagtcttaaaatataaatagtcacagtttataaaatatgtccagcttgttaaatttacagtaaacctcagaataagttctcttgatctgtagtactcccatcttgccagatgagtttgaacacagagctcagctattccaaactgatactcatctttccaaaagtaaatctataattacttgttgttttaatacttttcagtatggaatattaaattcaaggatgttcttagagtagtgacaaatctgaagctaataaatacactgaagttaagggcagcattgagcatgctgctgcagggagaacttcagcctcagatggccagagttacagctacaaagaaaactgtgtgtttcttactggtgtgtgtgtgtgtgtgtgtgttcctcttagatcacaaggaagcagagttaaagaaggtacatgcaatgataaagttttgttgtgcatttctactgttcagtctccatacacagggtttttatacagactgtcaagaatgccacgggctgtttgtgctccatggtctgaccacatggttctgtgtatgctatgttgacactgcattattaaaggctggacattgtgtctggagggatccacacctacatccttacttgacatctgctgttctaatgtgatagttctctctctctctctctctctctctctatctctctctctctctgtgtgtgtgtgtgtgtgtgtgtgtgtgtgtctgtctgtctgtctgtctgtctgtctttccatctctctctgcctgtttctctgtctctctattcttctccttttctccctttcgtctattgtttgttgaatgggagtagtctattctttcacactaagcataacttatggtcataatcacagcatcctctcttaactgagccgggtgtatttttttttctcttgttaccttcattctgtctctcattcttgactcataattcaagaaatatctgctgaactcctattgttttctaggcataagcactcagtgaaggatataaaatccagctaatacccttgctctctggaaagcctcaagtcaatgaggtgaagaataaataagtaaaaacatattgacttttttaagtagcaaaacctgatgtttataaaataatttacggaaattgccagtgacctgggcctagaattcaggtgcaaagctattttaaacaggctttcataagaaagttcttggaagacatggggtttatttctcatgttaccagctagcatgtaaagttttataaaatagtgaattttgttctcacttttaagagatgtatttaaaattgttgcttatcatttaaatgatacccaaatcacttagtatcctatgttcaatctcttcatgtttgggaatttcctaaacgttttctgttgctgagataactttttgctttattatttgattggataacagacattgcttcattctttttatgtactagtattgctttatggtctacaacatgatttttaagaaaacttcatagactgttgagaaatgtgggttcagaagctggacagagccaccttgtaggcatatgtttatgcgttcagcagctggacagagcattctgtagctgtgtgttcaaaccatctaatctgtgaatagatgaatgaactctgaagggtccctgttagatttatttttttcctttctgggttatccatgtactgatgagcattggggactgaagccacacattgctactgtatctagacctatgtccactatgtttagtagtatttgtcttatgaaactaagtgcatcaaagtcactgatacacatgtctgtcattgtcgtaattcatgtccttaatgtgtaagaattatctttatcctgctgagtaattttagtgtggtgtgtgctttgtcccatgtgagtgtaactactgctgcttcctctctggctccatcttccacctcttcgttttcagtcttaatgggtctatatcaggacagcgagtttcttgtagcagcaaaaagttaaactttgaggttttgtttgtttgattgattggttgattttgaatccatgcaaccagcctgcctcttttaattggagaggtgagactgtttacatttgaggtctttgcagttgtttaaatgatataagtttacatgtgaagttttgtgatggtttaaatgagataacatgcacacacacacagagacacacatagtctcaggcatttgaatatttagacccagttgataattctatgtgctgtcttgctggagaaaatgtgttactggagatggcatttgaagtccaaagacatactgcagcactcccagtcattctttacttcctgcttgcagtcttaagatgtaactctcagattattgctccgcccactgtgcctgcctcccctggtggtgatggacttttgtccccatagaactgtaattccagataaagccttctttcgctacaggttgtcgtgactgtggtattttatcagggcagcatagaaataactaatatcaacttagttttgaaggtttacactaatttctttgtcttagaggtatggtagcttagttactcagtaatgtctgattcgcagctatcttattttttcttttttttttaattgcttgttttatgagttttaatctttcccaagttcacttgtgtatgtctttttcttttcattttccacgtgtaaaagtgtgtcctttacatcacctctgcaatactgtgtcaggatcatagattctttagtttgtgtttatcgtggcatatctccatatttattctatgatttaaaggataatttagtcattttgtttagcaaaacaattgtttcagtgcctgaataccagcccctggtctcctatcctttagtattttgcttagacatctgctcctgtttagatggagttcactttttatgaaacttttacattttatcttgaaatattcactattatttctttacttttagctttctcactataatacaacatgaagaggttattttctggtcatgtctgttggtttttaattcctcctatcctgagatgtttgtgtcttttccagatgtaggagaatttctgctataattcattgaatatggtgtctacgcttttatgctacctcttggttcctgcttctacatcacagattcataaagttggcctttgagccatgagtcataaatgtcacattatgttttctttattactgtctgaaagtaaccatagcataattatgtctctaatatctgaggttttttcctacttggtctactatgttggcaatgcttttgttgaggtttttccacttgatatattggctcacttcaaggatttctatttgttttatttgttagaatgtctacttgctaaacgtctcttctggcattattaaggtcctctcccaagtcttgaatggcttgttattttattaacatgcttccattagctcatgtatactaagaactgggatttctgattcttactggggaatttaattatttcaatatctttaaattcctctattgaatagatatggactcttggatgagccacttttgtggtctgtcacactattgtatcctgtgctgtgagcattttctggaattcatctttttctagttttgcacagtgatattgctagtaatctgccttatttggggagattactccctataatgacacagggggtgaacacaaattgcttcaatagtaacaacctcaaagcaaatcagatacagtaacatagcaattaataataactactacccaactagtcccacaggaaatagagcagtagaaacaatgtagaagacactatgaaactcaaactgataaacagaaagctagttagaagaaaagtaaaatgcaataggatcatagagacatgaaaagtgaaaaggaaataagattcaataaaagaaaaagaagaattaacaaaataatgtaagaagagaaaatacaagggataaaaattactgattacaagaagtacaaaaacaaaattgaataagagccatagggaataaaatcaaaagattaaaaagaaaaggtataaaaatgctaacaatatagttagaggacaagaactggagatgtttctttctgtcttcctactgtttggattttccatgtctagggacagggtaaaagctgtaggtagagtccatgaatgtttctctcagctcccagtgtacacgttcctgtgttaagctggaggtctagtgtaattgtgagttttatgtctattagtaccttctgcatgcctcaatatctctacagactatgcaacaggcaagttcccattcactccagaagactgtctgttgaccaatatctaaggtatgggatgtcctctaagagtattggagagctggagaagccaaaagaattctgcactggaggaggagaaccaagaacaccagagaagcttgggctcccactttttgtaacatctcagtcaggaaaggttggaaaacacccagctgagggaaggctttatgttacaatgggaatttctaaactattccaacaaaaagaattgaaattgcacaaaggagatggctaggcatggaaaggtacttgctatataagtctgtcaacctgagttccatctttggaacccatagtgaaaagggagggcagactccccaaaactgttctcttacttctgtaggagtgcagtggcacacacacacacacacacacacacactccataaaacaataataatgatgataccaataacactaatatgaagaagaatgtgaagacaaggaagaggaggaagagaaagaggaggagtaatgaggaggaggaggaggaggaggaagagcaaccccaaagatctgtgtagggagactatgcttgaaaaacaatcagaagggaacagcagcagagacaagaagcctcctgagtggattctgtgatagctaacatacctgagaaggaagaaaaggagaggcaataccactggcactgcaagaatgatggggctcagtggtcctcaacatcatttctcactcactgctgtaactgaatgaaggccagaggagaacccatgacctcaagtttctagcgccacaattatgggacaacagccattggtggatactgaagtttcaactagagtctctcattgcttctgaaggaatcaaggctttgtgtatccgtgagttacacttaaacaattccccagtcaaggcagcttaaaatgtcttgtgtattcaggatgctatccagaggttatgttggaaaggtcaagtgatctttgccatctccggagatggttatggctaagaaatctaactaggattctctatcctttatttgaagataataaaatgcataggaaacattgtgataaagttgcaggatcactggtgcagataagctgccgtcctgtttatctagttcatttttaaaggtcttttgctgagagtagggttttgagaagaataattaaagggaagaatcttaagggtcctctaaataagggagattaagagacttgaattatttattatctagaaatgaggaatgacaggagaggtagatacaaattaatgagtggtttgtaaaatcaattggctattcttcttcattgcagtgagaaaggcagaagaggaagctatggattgaaagggctagcaacaaatgcaaaattaatgacagacatgccttgtggtgcctcattcatggatgcaaaaatgtttctatgcctttttattgaaggacgtgaagctgtttcaagacagaattttctctcaaacttccagttcactattctttcctcccaccaccaccaccacctattaagctgagttttagagagctctactgaagccagctccacagaggacctgggaagtgaatgtaggtagagctgcacatcgtctcacttactttactcttggagcattcagaacaggttgtaacagtggatagtcacctcaccagctacccataaagcacctcgtgggtaattgtccctgagaaactggtgtaataagctatgcttagcagaacatagcctggcatcccgtgctggtagaaattcagaatacagatgcaactggtgtatctggtggagacagcaggctctcccaaattatttttggtaacttgtactgtcccttacagagactccaggaccaagcccaggacagtttccagttcctttttattcttgtgtctcacttaccttgtctcaatctgcatacatttcagggacatttttttttttttttagttgataagcaacaggatggcaaagtggagacttgactaaatgctgaactttgcttgctgtggcctcttaaaacatatttgaatgaatgaataagttagtgtatgaatgagtacatgtatggatgatttatgatcatccaccagacaagttctgttgctacaactgtggatgcaaatcaggatggtccatgcctttgcagagtctgtggccaatggggctgggagaagaagaatattgactgatgcattcttttaagagttgagagatggctctgtatgaaaagtgcttgtaaatccagatggactgggatgtacctgtaatcttagtgctcctacaggagatgagaagtagcaaggagaccccccccccctacaagttcataggtggctagccagtcatgcttagtggtgacaataacagaggtaaacaataacagagcctgccttaaagatggatggcagacaggctgattgatatatatatatatatatatatatatatatatatatatatatatatatatatatgcaacgtcgaccagttgtccctttcattaaaaccaaatctattaagtagcatgttgatattttaacttttatagttccttcctttgagaaaaaggagaacaggttaggactggtacccaaagttatcctctgacatccatatggcctccttgacagatgcatgcccatactcaccctcacatacaaacatacatacatacgtacatacatacatttacacatacatacatacatacatacatacattcacacacacacacacacacatgacatacatataagatgaaaaaggaaaaatatagcatcaccttattcatcaccacatagttacagacaaccaccattgcctcacatcaggttttcagacactttcagaagactgttaaatacaaggattcagttcagtgaacccgaaaggtctaagagggtcaggctaatactcttctctagatgctgactccctagttcccagggtccactggcttctgtttctctccagttgtcatctgcatatgagttccagacctgtgaccacacctttggaaacaggcaatttgactgcctatgcattaggttacatccttgagcccagaaggtgttcagacaatgcttggtttaattgtggttgattgattaggagtatttcgtattctgttctaagtataatacatattgatcaggaaacaggaagctatctgaaacctgagagtttcatttaaagctgacctatatgtaatgaatatgccatgcattatttaaatatttagtactcctgtgagatgtatgtccatagcaaagagagaacagaacagctggtgagatggctcagtggatgaaggatgccaagattaaacatgagtttgatccctagaactgacatggtagaaggagagatacaacaaccataggttgtactctgaccatcacacaaaagataagtaaaagaaatataatttttaaaagagagagagggagttggagagatgggtcagccctgttggccacagactctgtaaagtcatggaatacccttattttcattcatagttgtagcaagacagcatgtctgaaggctgaccacaaatcatccatgcgtttactcactcatacagtaacttattcgctcattcaaatatattttaagaggcagccataagcaaagttcagcacttaagtctttactggatacttccccagaggatctaggtttgagtctcagtacccacctgacaacttacaactgtctgtaactccagttccaggggatctgatttcttcttctggcttctgtgggcattgaacacatactatacatatacatacatacatacatacatacatacatacatacatacaggcagaacaaataaaaaatatttttcttaaaagtttggacatgaccagatgtcattgaaaggtgtgccccaggataatactgacttgtcttctacattagtcacttgctggccattgacagaaagttatttgtagtgacttaaatacagaatggaattactggttctccttcactataaaacatccctgatacctagagagtctaaagctggatttattttgcctttagttactgcagatgttggtatctgagaatgtaactaaaacaactatttttctttctccatctgcctctccctatatctcagaagttgtgggcttcgatatcaaatgcctgtgtccaagtggggtgatcttaaggcaaggtatgcctataaaataagtcttccaagtatcatttttatgaactatacctcaaagaaggattctgaactttccaagctaggaccacacccaaaaggatctgtcattgactcttttcagtggtgagccattatgatggactcagtcaccatcagttttcagtcctgatgggcagttgcactggcaaacttcttgctaatcccactaaaaccagagtggtgaaggtaagttgtcaggaaagacagtaggccattctaggtaagaggcaaatggtttgctccatgttggtaataggagacagttgtaagatattgtcgagtgtgcctgtgagagtgggccaagttcacagtgacctggtaggcaggattggctatagatggtaatttgtaaatcttgaccaacttttcttccacactatttttctgtattaatgttcaagtaaattggtgttttatacaagcctacctggtagggtgtaatgctgggagactaggcaaactgtattatgcagtgagcaagttccatgataaccagtgccctcttgttgggcacacagatgatggtctgcactctctgtcctttgttctgccattggtttgtgagttgaacttgaagactttctttcatctgaaaattcttacaaatcattgtgaatagcaatgggaatcatttcaacttcaaagtctctctccaccctgaagagtacaaattataatcctattttatcctaatatgttaatcctagaagagggctgaataaacatcgtgaactaaaattaaatgtgattttttttcaatgtctttctagttcctttaagggaaccaaacattttatattaaagtagtatcttaaatgttttattttaagattcagaaatgtgtctaaatatacatttttcacttataactgtgaaactggaatgcagttttcagttataatgaagagccttgacaaggaatgactagaaacccatactctttggtgcagtatgtgaagcacaccttattcaccttgggacattgcttcagggcttggaccaaacttcttgctctggaaggtaatgggtgctgaagctgagactcctgtgctaggactacctggatgctgagcagtttgtttagtaaataccttgtctggtaggagtaggatctgggtccgttccaactgaagttggggatgctgatgaaggatacattaccctcatgtggatgcagagctcagagtagtttagtttaggactcaattgagtatgtcagagacagaagtctacatttttcttcattgaatatgaacccaaagaagcccccagtagctacaacaggaggaagtcaggagtccatgtttgttagttgccatctcaatgacaaagccccactttttttctgaaatgaacagtgacagttcctatttttccaatcttgagaggcagctatgtactcctggaatttagaatgtcaagagcctcaggacaaaaacaggtctgagagccacatcatgacttgtcctgagcagttatcagtaggaggctctgattttatggggctagccttctccagaagtggtagttctgagagaaagttggagaagagagagcctctgctggctcttcacgttcactttgccttcagctccatcttgtgtggtctggaagactcacagagaggaaatccacttgacattcctaacaagcacacatttgagggtgggtctcaaatgatatggggctacagatccgtgggatgggtagggctgggtggattctgacaggccagctttccctgtgtgaggcaagcctctgtgaggagcttcagcacaggaagtcactacaggccacccacggcgcaggacaaaccaagcaggcttggttcacttgtaagaggaaccggaatgggcatctggggacaagattcaggtttttgctaccccgaaacaaggtctggagagtaaaactgtttcaatctgttacatcaggctgtatgccatgaccaggtaacctatcattaaagaaatatcaatagaaagccaggtgccgaaatatagatccaatagtgaatctatgtgtgtttatttcttttctgttttttttttttcagtaaagaggaaacctttatcagatttcctcactagaataggtggaaccaattggacaggagcccaagaaatgtcctctaggcacataaatttaaaaattgaaagaaatctgaaaaccagtgagttgcaaaatgtccttgcttttcttaagtttaattgaaactcttaggtattgtttaaatgtttcatgactcccaacttccagaaaagatgctgtgaacctcaatcttcagacctcttcagactttgaggtgtacatcttgttaaaatgtggttgctttctatgttttgttctgtaaggaaggaaatatcccttcattgcaaagatgctaagctctcagtctctggagaagttcctgctctattgtagacttacagctgcgggaggatgtagaagcaattatgcccttcactttgaaaatcctcattgtgtttcttttttgttttattgccattttctatgcagacaaaaaccctctggatcttgtaacaatgaatgctaagaataagcatccaagggaggagttgctgagtgcacagatatcaaagcatgtgagtgtgtgagcgtgtactggtgtgtgcatgtgcaagtctcatgtgctaagaatgagcatccgagggaggagttgctgagtgcacagatatcaaagcatgtgagtgtgtgagcgtgtactggtgtgtgcatgtgcaagtctcatgtgctaagaatgagcatccgagggaggagttgctgagtgcacagatatcaaagcatgtgagtgtgtgagcgtgtactggtgtgtgcatgtgcaagtcttgtgtgcttggcacctgtgagtaagcttgctcattcttgccctgacagccatcttcttggctttcagaatttacaaaaaaaaaacctttttctatgaagtatggtaaacactaagattgttattacattctcatgaaataagccatggatttactttaaagttcctgtgttacatctccttatgttttgcatcttttcaacattttaaaacgttgaaacataacagaacttatcctcctgacccccgtgtgcatggttcaggggtgttctgtacacttccactgtttagactggattttcatggtatttcccctcacaaatggcagttatgttcaacacaagctcacctctgctctccggagcttgaccgatctgctaaaggaacatcctcctgttctgttcatttcctgggtgacttatcttagagcacacgatgctctccaaggtcagctatgctgcgtaccatggaggaatttccttctaggctggctaagatgccattgcatgtgtgtcttcatttagtttatcatctgtggacatccaggcttggatgtgcaacatcctcaagatcttcccgtgtttgcgatacttagacacagagctttagtttaggnnnnnnnnnnnnnnnnnnnnnnnnnnnnnnnnnnnnnnnnnnnnnnnnnnnnnnnnnnnnnnnnnnnnnnnnnnnnnnnnnnnnnnnnnnnnnnnnnnnnnnnnnnnnnnnnnnnnnnnnnnnnnnnnnnnnnnnnnnnnnnnnnnnnnnnnnnnnnnnnnnnnnnnnnnnnnnnnnnnnnnnnnnnnnnnnnnnnnnnnnnnnnnnnnnnnnnnnnnnnnnnnnnnnnnnnnnnnnnnnnnnnnnnnnnnnnnnnnnnnnnnnnnnnnnnnnnnnnnnnnnnnnnnnnnnnnnnnnnnnnnnnnnnnnnnnnnnnnnnnnnnnnnnnnnnnnnnnnnnnnnnnnnnnnnnnnnnnnnnnnnnnnnnnnnnnnnnnnnnnnnnnnnnnnnnnnnnncacattaattctttaccatgtgtgtcattatttctttgctttacttattttctcttctaaaatagcattttaagacctataacattagtatgtatagtctgcataaaatttgcatctttacaaatatgtttaatatatgcatatatacacatacaaatatatgcatatacatatgtatgtgtgtgtgtgtgtgtgtgtgtgtgtgtgtgtgtgtgtataacagtctatatgttatatgcattgatcctagtactaatgttacttaggaagaattacagaagtccaaagccagcctgaactacaaagtttcagatcagctttggctatagaaagagataaaaaactatcaatctcttaatttaaattattaacactaatagataattataaagggtattatgatgtgtgtgtgcatgtgtgtgcgtgtgtatgtatatgtgtgggtatctatcttgtaatatgttttatatgtattgattatgtcccttgcaagcaaaatctgagaggaacactcagaaatactatagatatcatagaactgtctatccaagaagacacataaaggaatgagggcagatgagaaatgaacaggaaagagaaaactatatgaacctggaaaaggtcagagccatcccatattcccctgctctaaagcaaattggccatttctcactgagccaggcagatagtctgtgtgcctctcagtgactgtggctaaaaatgcacaggaggtatttcactctctagaccctgcaggtcataggatacaggtgtgggcccagtcaacagtgtgatctgtgtgggaccacatcagcttctgtcctgggctggagcctcctcctcgacacacagatacaagctagtgtcctgacatgcaatccacccccataattttacatgaatacattttcttgcttacaaattataaagcatattttctttcatttcatgtggaaaattgcagtatttttatttcatttccaagatagtcttttggtttgggaaattgagtagaaattcttatattcccaattgtgccaagaatacgttgaccctattgtcagttttttctttctcagctacgtcaagcccattaatgagaaaaattgctctaacatctagttcaaatctcagagaagccatcagtcgcaggagacacataacccattctcctgtgctgcccttgacatcagggtgtggctcagcccaaagcgctcaaaggcagtgggagacacagcctacctttgcttagagtacagcaaggctttgacatgtgaaaccatccagaaggtcttgatgaaccacagatgtcacctaaaatattaatatgtatcacagcaaagcaatagaaccaccaattgatttaccaaatggctggagtggtcaatggatggtcataaaattgttttttctatgatgttttcttttatgtcacagtggtacgtgtagttgactatattgggaaatctaccctatgattaaaaaaaaaaaaaaaacaacaagcagtacaaatcaaagatcccatttctacctcaccagcacaccaatgtttagacaggagtggtgaaggttttcattcagaaatattagtcttcacatggcataggctagccctgtggaaaataactaaagctcgatatcaccttaggtgataactgttgaacattgagagttcccaaaccactgatggccagccaccatggacttcagtcagggtaagcactcattggtgtgaggttccctttgaggcaataacaaaggcctgtagtgtggccattggtgacaagtggcctccatgggcaccgttcttagtagtgtcagtctgaaagaagcaacagcaacaacagcatcaaaagtgagagaagccgattttctgcagatctgatcattctctgccacaatcaaaagaacacatgctctgtctttctgcaggcgtccttgtatgtgcattcatctttatattgtcggctgtatcagtccatttggggttccgcacaggatagcgagccaacaaagaagagactggcccctcttagtcctggccctgtcactggccaaatgagcctagatgactgtgtcacgatgcagtcagaaatccctgtctgcactcaggatgcgcatatacagagtcgtgcaatgatggggtagcccatctcatttttgccctgccccatctttagcatccccttaggccatacttaggaccatgtttagaatcctgcttatagagttttcagatattcagtgactgcataagccttgtgtttcttttaactgtttgtgttagctggcagactggcagactctgacacgggttactgttggttcacctgtaattacaaaacatcacagcacatcaaacacttttagactataatcaacctacagactaataaaaagtcaaaacatagggcactatttgacaataaaatatgttaaatcctaaattagaacaagatatgctgagacataggcatagaaatgtcacagggggttccattaccctgtatgataacctaaaaatgaataagaagagaagtgtgctagaaattagtccacgtgaatctggaacttagcaaccgtggctgtaaggacatagagaaacttgacagtcgctgctgctgaaccctttagaagccagtaaagtgttactccacctgtcacggtcatcattgcagagtccttggaagttaattgacactttcaccaagagacccttctgcagagctaagaactggaagaccactctgtttattagattatcccctctgtcaacaccatgctcgtcaatccatggccctatgggatcctgctggcttctgtagattttcctgtggcccgacagtctcctatctatctaatgaccaagtcaggaccctcatagaagtcaaaatgtcaagagatcaaaatcaggaagtcaaacttggtccagttttctgaatgatctgttgaaacatttcctggctaatgaggactcccagaccctctgcagcttcagtcagggctcacactaacccaccttccacgccgcagtttatcatgctgcaaaagctgccattgcctcttcctgttgaggttattggaggaggcggctagttgatacttctatcacttagacaagctgcttccccttgctggaggtagacaactgcatatggcacactgcgttttcttatttgtctgtgagtctataggaagctcttttgactatagtaggcaaacatgcctcagatcctagaaaagccatagcttctctcagctctgtgtcttttacttaaaagcagggatgggtgtcttggcacactgtgtatgtgcaagaacaaggtctgtagagcaaccatgaaagtggagtgtcacacacggccgctccacagcttgatctttaacacaccatggaagagtcttttgatggcttagaggctctgcataagtttccttcacattaagcagaaaattagccacatgtttgtatatgtgtagagagttattaaattgttttggactttggacatgcatacattaaggaaaaaagcatatatttgggtgtggtcacacaggccagtaacttcattcaatattctagaagctaaggcaggagggtcattagatttgaggccattttgggatatatgacacagttcctggctagtctagactaaatcttgtcttaaagcattaggcttaaaaataaacaaaaacaaaaaacaaaacaaaacaaacaaagctgtttcagttcagagagatggctcaggagttgccaagcctgataacccaggttggatcccagaaccaacatggtgaaagaagggagagaatcaactccagcaaactgctgtctggccgccacatgctcaccatggcacaaacacatccactcctatttaaagtcaatgaatgcaaacaatcaggatggattttatttatttaagaacaactagacacttaactgaatatacaagctagatttgatagttcataatgacagctttctctcaatcataaattttagccgtgaggtaaatgtgtttgtgcacttttgtcccctggtgctttgggtcacttcataggacacagtggaaaagtaaaagcggatgttctaaataccagaatgaagaattcaatatggtgactaccatatcaataacacactgatgatgagagccacagtgttatgcataattttgagatgataaaaaaatttccatgctaactctgtattacacttaaccatacttaggtctcttagaaacaagtgccccctgaacatgggaaaaaggtcagcgggaagttagtgggaacgatgattaaaaccatgggaaactgactgcatatgctacaagttccatttcattatgttagctgaaatgccatgcaatggaagactaggtttattaggatgcttggaaagagttgcagggatgtgaacggttgccaaggaaaggaagagcagagataggaactgtatctaagattttaccccaaaattcaaccgtttatttggtagtattcagtcataattgagtgtaatggttaaactcaatttgaggccgtttttgtagatttgtgatatggtgaaaggatgggctgagttcataattgtgttgaggaaagtttcatattctattattggttttattgctatgaagttgtgggcgttgcttcactgttttccctgttccgtaaagtgggtcatgctgcatttgcgcaagcacaggggagatggggtaggtaggttatccctgctctgcagtgggtatttgcagattcagaaatgcagaaggtattgtagaatcaggaatgcagtgagaattatagattcaggaatgctgtggacattgacgatctggggatgctgcaagcattatagaatcaggagagcggtggacacagcaaaattaggaatgcagtgaatattttagaattagagatgcattaagcattgtagattcagaatacagtatacaaccaaaaatacatgaagaattacagaatcaggaatgcagtgggcaatgcagattcggggattcagtagacactatagaattaagaatacagtaagatttatagaatcaggaatgtagtagtcataggatcaggaatacagtagacactgcaggatcaggaacgcagtgggcactgcagagtcaggaacacagtgagctttgtagtttcaagcattgtaatgaacaatatagactctcatggccatggacattattgtgttggtatgtatataacgctgatatgaagtgagaatgtatctagtgactttcctctcttccttatttcaggttgctaccagctatgtaatgtttttcgatctcatgagatggaaattgaccagtgcttgctggagtccctccccctgggccagcggcagcgtctggtgaagcgcatgcgctgtgagcaaatcaaagcttactatgagcgagagaaagtgttccagaagcaggaagggcccctgaagagaagcaagcctgggaagaggcagaaggttcgcttcggcctggctgacatgattcaggatgctgtcatccaccatcatgacaaagagggtatgccttctccaaagagatctcgcgatctgttttctgtttgttctttcccagggagatgagaatgcctttaaaaaggatgtttcctccaaagtatggtatggaacgtcatcaatcccttaagtgatatgtgaaaaagtaaattttgagggaaatgtttgtatacagcttgaaaaaaaacttacctatctaaagacaagagacttcttttaaaatttaactttcattcttaacaggaaacattcttagatcagtggttctcaacctgtggatctcaacccctttgtgggtcagaggaccttttcacaggggtcacatgtcagatatcctgcataccagatatttactgtgcaattcataacagtagcaaaattacagttatgaagtagcaatggaaacaattttcagttgggcaggggggtcaccatgacatgaggaactgtgttaaagggtcgcagcgtgaggaaggttgagaattgctgtcttagaagatgactgtgactgcttttctcatttttccctcacatccacatggatacaggcaaagtcagttgcctcagaatttgtcgagggttaagactcaactttttgaaaactcatttcctgggcagctatcatgaccttcccttgtcgtcatgcactatgtgaatggcctcagatcttatgtttgggtcttcggctaattttgtatcaggatgggattgagtttcagtgttctctacgctggtgtccagtttccctgcaccgtgtgtgccgccttcactttctccagttggttgtgagtttaggagtgtatttgggggtctctcttgcattccagtgatctctgtgtctattttatgcagccattaggctgccgtgaagctcttcagtggcttattttaaattcctgaaagcctgcttccacagtgacacacttcttcctcctaatcacgccaatccctctgagccaagcattcaaagccatgagtccatggggccattcctactcatatcgccatgccttaaggactctgtcctttctggtgagagaaaccctgggatattgagaggagctgataaccaactttgactagggttcagacgactaaaatgtcagctgcagcgttggcattggaaatcattctgatgagatttcagatgagaatgaggatgtccatgtctgaacctgggtggaggccagacatattaagttattatgaagaatatgtttgtaattttgtccatgccctgagactgtggcagactatgtttaaagtgggttggctcattcgtctgtgagaagaaatgtcaaaggcatctactcttcaagctgaggcatggtatctctctgcttttaacctgcttctcagtgagaagtagaaattaaaagcacaatcaaaagactcaaaaactggaatttggtaaaaaaaaaaaaaataatataccaagtagaggctaagaaggctttggcttcggaagagatcaacatcaataaaagaagctacgtatgcttttctggactgctaggagactgccataagggcatctctgtagtaagctaaatcttgactgccacagctttcaagagatgagagccctggaaactttattttggaaagttagttcctctgggatccctgcttatatggggctactcaggaagctgtttctcaggactcattccagcacagtcagaagtcatggtggagtggaggactgagctacgtactcagcttgcataagactgtggtgtagtccatgtaaatagggtttactgaaatgcaagaaaaacctagccatggagactgcttcccaaaactgaaaagaaatctgaagctagggtggggaacaattaacacatactaaggctgggcttcctgtaagtggctgcagagagggaaatgcacaggagagtgatgtctaaagtgtggtgaagagtccaggatgtcagagatgccaaatatgtggcatacctgcccaaaacagctagcccaggtcagatgtcccatggactcaggtggcaaggccacaggtagagagtttaaagggccctgagaacttatttcctaacctggtatagcctagatgctgggctcagacttagtttgttgggtttcagtttggggcgttctctccttcctgggtgttcttcagaaggggtgcactatactaaccaccacatctagacatgtgtaacttacttttatcagggctgactgctaagagtaggtcctgattctcaaaggagacattggacttgcatttttgaaaacatttggaactgataaaactttcaggcatcttagagatagacttcctggggttttcattatgagtcagccttgagttttaggggctataggtgaaacgtcatggcttgaacctgaaatgttcctcacaggttcatttcgtgactgctttgtctccagccctttgtgctttgggcaagtggtggggagtttaggaaggatcgccttgctgaagggaaaagttcacatctgtgtactgctgaatgttataaatgggctccgtccactttccttcactatagttacagacagggttcccaaaacctaagtccaaccttgggttgaaacaagttgtcatacagtgtgactcgttttatgttgttttgtcacagcggcagcacggtaactaatacagtgtaaatggggactttttaaagaagccagtggaggtgtgtacaccttgctaacctctgaagccactggttggctggatctaaggtggatactcttcaccatggattagccacaatttgaaatcccaggttttctttgtagctcactatagaagatatttttctgacctgatttttcttcttaacatgttcaatctgaaaaattcatgaatttaggaatgtatgcatttcaaagactctcagacaaggattgtgaatctgtagataagagagctgtcagcacgctgtgtgcaatgatggctataacgagactctctgctcttctatttggataccccagtgaaactgctctttgctgagatgttcccacatcttatttaaatgcacatgcgtttatgcctttatacatggcagtagcagaaagcgtgtgatctggtagagcttgagagagcctttactctaatgccatttacaccagaaaggagaggtgctgtgactgaatcgtcacctgatggtcacatgcttccccagggtaacgtttgcacttgtaactggcacttaacagctctgccactcacactttatatacacagtgataggaggaactgtgtgtgtcttgggctctgttccactcttcctgtttagtgcattccttagagtgtggagtctaagttcaaaaccatttacgttcttcactgtcagcagatgccatagcaaatatacatagaactgaaatctttgtgccttatcattatgttggtggaaaagtaatgaaacacacacacacacacaccttagatgaaacactcatacatcttgcaaaatgatgtctatgggctcaattaagagtagtaaaggaataaatcccgttactcccctacgaccttatagaatcatatttttcagtcattcatgctacaccacctgaaccattcttttccaagcagttgttgacaggtgacaaccattctgtcactggcgatcagaaggcaggaaggagagtgatttttcccctgagaacacccatctagataggagaaaacctcagagtacacagaacatagcaagtgtgcaggagggagcgaagtctgggagagtggcagggatggggaaacctacttggaaaatgtgattctggagggatttgcccttaaccattgcttgcactttagctatgaggagagcatgctgcagtgggtagcagagcagctgagcagccatagacacagcaggtggacatctggggtgagctggatgggatgcgagtggagcagtgcttgttaatcagagtatattctggaaagtcccctttgttactcctcactcttcatgtgacttagcattgtctgttcatttaagtaggatgagatttccagggattctcttgaatcagaaagcagggggagctatcacatgattctaagtgggaccttgacatactacaaatcatttccagcaaagaatagtcagcgctatttagctgttgagcgggctgaagggtggatatgaactgcacgcaagtgcaccagctgagggtctactgatgtattctcagcattcagaaggccgggcgtggcttgccatgggagccagagtgagagaatatagaagagccatgtcacaggaaaggtcatgtgctcatcacatgtatcctaagaccgttctctgaaggacaaccaggaatggagcagacaaggcttactccctgaggcacaactgtgtggtatcagcagccatgaatgaagtcccagggatatgtagtgtggccagtgatgatgcatctaaggagagcttcctggaggggctggagaccactgtgcagaaccatgggggagggcctccgtgacagtgtcctgaggtagaagaagtcccatcatgatgatgaaatggagatgtcccaggatgatgatgaaatggagacgtcccaggatgatgatgaaatggagacgtcccaggatgatgatgaaatggagacgtcccaggatgatgacgaaacagaaagagcagcggttcagcagtggcagaacggatagagggtacgtgaggagacacaagaggagtctgcaaggggcacgtggaagggttctgcctactgtatgtatggtttggtgacaccagtagaagggtttgatctcatgccatctagagattaggtcagtcaaagatgcatcctgagtggacaaaaggacacagatgtgagaagtggggaagtaagcaagaagggtcttgggcaagccaggcagggaggagaatatattactgcacagtcggtggctggcagagtttcaatgcaccatcttccctcacatttctgtaagtcaggtctggggctcaatgggaggactgaaatttgggtgccgtaggagctccgtcgtcatttctaacagccatatcccttgcatcagtctccttctctgtctgcaagaggaaccatggtgggcccagactccctctttttttttttttccagactccctcttacactttatgtgtgttgccactttttgtgtcatgtcatctcttccatcaagccttccatctgtctcatcagttttcacagccctatttgcccagttcatccagatatcttcactatttaaaagacagttaaagccgggcatggaggcgatcccagcacttgagaggcagaggcaggtggatttctgagttcaaggccagcctggtctacaaagtgagttccaggacagccagtgctacacagagaaaccttgtctcgaaaaaccaaaacaaaacaagacaaaacaaaacaaaaccaaacaaaacaaaacaaccccacaaaaccaaaaaagacagttaaaattagctagtatttgcctttcctgtataacatattcataggtatagaacctaagacaaaactaggcagctccaaattttgcctggggaaaagaaggaaaaataccatacttatttttgtttgtttttggttttgatttttgttttttaactagcaatgaaaggaatacggtaccattaatcgagagaccgatttgctggcttgagaagaaaaaatgagactcatgaaactataagatggcattgttaggcagaacaggatgctgcagagacttttagcagactttattatacctcacggaagacctagatctcagcaagcacaaggtcggagcctgtaggactgcgagtgttacaaagaatggctacaactacctagaaatgcatttgactaaagctctaagaagttcacagactgagaactaaggaatgctagagctactaattcattgaagtgaatcagggaccagatgcagccagggtgggggtgggggtgggggagcattgcaatgggaacagagtttcagtgaaagccaagtcctgaggaaggaggagaattcttttggttgtgccagctgacagcactctaggcatggggaggtcccagaaccagccaccatgttcaggaggactgaagttagctgttttcttttttttttttcttttcttttttccattttttattaggtatttagctcatttacatttccaatactataccaaaagtcccccatacccacccacccccactcccctacccgcccactccccctttttggccctggcgttcccctgttctggggcatataaagtttgcgtgtccaatgggcctctctttccagtgatggccgactaggccatcttttgatatatatgcagctagagtcaagagctctggggtactgattagttcataatgttgatccacctatagggttgcagatccctttagctccttgggtactttctctagctcctccattgggagccctgtgatccatccattagctgactgtgagcatccacttctgtgtttgctaggccccggcatagtctcacaagagacagctacatctgggtcctttcgataaaatcttgctagtgtatgcaatggtgtcagcgtttggatgctgattatggggtggatccctggatatggcagtctctacatggtccatcctttcatctcagctccaaactttgtctctgtaactccttccaagggtgttttgttcccacttctaaggaggggcatagtgtccacacttcagtcttcatttttcttgagtttcatgtatttaggaaattgtatcttatatcttgggtatcctaggttttgggctaatatccacttatcagtgagtacatattgtgtgagttcctttgtgaatgtgttacctcactcaggatgatgccctccaggtccatccatttggctaggaatttcataaattcattctttttaatagctgagtagtactccattgtgtagatgtaccacattttctgtatccattcctctgttgaggggcatctgggttctttccagcttctggctattataaataaggctgctatgaacatagtggagcatgtgtccttcttaccagttggggcatcttctggatatatgcccaggagaggtattgctggatcctccggtagtactatgtccaattttctgaggaaccgcccagatggatttccagagtggttgtacaagcttgcaatcccaccaacaatggaggagtgttcctctttctccacatcctcgccagcatctgctgtcacctgaatttttgatcttagacattctgactggtgtgaggtggaatctcagggttgttttgatttgcatttccctgatgattaaggatgttgaacattttttcaggtgcttctctgccattcggtattcctcaggtgagaattctttgttcagttctgagccccattttttaatggggttatttgattttctgaagtccaccttcttgagttctttatatatgttggatattagtcccctatctgatttaggataggtaaagatcctttcccaatctgttggtggtctctttgtcttattgacggtgtcttttgccttgcagaaactttggagtttcattaggtcccatttgtcaattctcgatcttacagcacaagccattgctgttctgttcaggaatttttcccctgtgcccatagcttcaagacttttccccactttctcctctataagtttcagtgtctctggttttatgtgaagttctttgatccatttagatttgaccttagtacaaggagataagtatggatcgattcgcattcttctacatgataacaaccagttgcgccagcaccaattgttgaaaatgctgtctttcttccactggatggttttagctcccttgtcgaagatcaagtgaccatagatgtgtgggttcatttctgggtcttcaattctattccattggtctacttgtctgtctctataccagtaccatgcagtttttaccacaattgctctgtagtaaagctttaggtcaggcatggtgattccaccagaggttcttttatccttgagaagagtttttgctatcctaggttttttgttattccagatgaatttgcaaattgctccttctaattcgttgaagaattgagttggaattttgatggggattgaattgaatctgtagattgcttttggcaagatagccatttttacaatgttgatcctgccaatccatgagcatgggagatctttccatcttctgagatcttctttaatttctttcttcagagacttgaagtttttatcatacagatctttcacttccttagttagagtcacgccgagatattttatattatttgtgactattgagaagggtgttgtttccctaatttctttctcagcctgtttattctttgtgtagagaaaggccattgacttgtttgagttaattttatatccagctacttcaccgaagctgtttatcaggtttaggagttctctggtggaatttttagggtcacttatatatactatcatatcatctgcaaaaagtgatattttgacttcctcctttccaatttgtatccccttgatctccttttgttgtcgaattgctctggctaatacttcaagtactatgttgaaaaggtagggagaaagtgggcagccttgtctagtccctgattttagtgggattgcttccagcttctctccatttactttgatgttggctactggtttgctgtagattgcttttatcatggttaggtgtgggccttgaattcctgatctttccagaacttttatcatgaatgggtgttggatcttgtcaaatgctttttctgcatctaacgagatgatcatgtggtttttgtctttgagtttgtttatatagtggattacattgatggattttcgtatattaaaccatccctgcatccctggaataaaacctacttggtcaggatggatgattgctttaatgtgttcttggattcggttagcaagaattttattgaggatttttgcatcgatattcataagagaaattggtctgaagttctcgatctttgttggatctttctgtggtttaggtatcagagtaatagtggcttcataaaatgagttgggtagagtactttctacttctatcttgtgaaaaagtttgtgcagaactggaattagatctttctttgaaggtctgatagaactctgcactaaacctgtctggttcctgggctttttttgctgggagactatttataactgcttctatttctttaggggatatgggactgtttagaaggtnnnnnnnnnnnnnnnnnnnnnnnnnnnnnnnnnnnnnnnnnnnnnnnnnnnnnnnnnnnnnnnnnnnnnnnnnnnnnnnnnnnnnnnnnnnnnnnnnnnnnnnnnnnnnnnnnnnnnnnnnnnnnnnnnnnnnnnnnnnnnnnnnnnnnnnnnnnnnnnnnnnnnnnnnnnnnnnnnnnnnnnnnnnnnnnnnnnnnnnnnnnnnnnnnnnnnnnnnnnnnnnnnnnnnnnnnnnnnnnnnnnnnnnnnnnnnnnnnnnnnnnnnnnnnnnnnnnnnnnnnnnnnnnnnnnnnnnnnnnnnnnnnnnnnnnnnnnnnnnnnnnnnnnnnnnnnnnnnnnnnnnnnnnnnnnnnnnnnnnnnnnnnnnnnnnnnnnnnnnnnnnnnnnnnnnnnnnnnnnnnnnnnnnnnnnnnnnnnnnnnnnnnnnnnnnnnnnnnnnnnnnnnnnnnnnnnnnnnnnnnnnnnnnnnnnnnnnnnnnnnnnnnnnnnnnnnnnnnnnnnnnnnnnnnnnnnnnnnnnnnnnnnnnnnnnnnnnnnnnnnnnnnnnnnnnnnnnnnnnnnnnnnnnnnnnnnnnnnnnnnnnnnnnnnnnnnnnnnnnnnnnnnnnnnnnnnnnnnnnnnnnnnnnnnnnnnnnnnnnnnnnnnnnnnnnnnnnnnnnnnnnnnnnnnnnnnnnnnnnnnnnnnnnnnnnnnnnnnnnnnnnnnnnnnnnnnnnnnnnnnnnnnnnnnnnnnnnnnnnnnnnnnnnnnnnnnnnnnnnnnnnnnnnnnnnnnnnnnnnnnnnnnnnnnnnnnnnnnnnnnnnnnnnnnnnnnnnnnnnnnnnnnnnnnnnnnnnnnnnnnnnnnnnnnnnnnnnnnnnnnnnnnnnnnnnnnnnnnnnnnnnnnnnnnnnnnnnnnnnnnnnnnnnnnnnnnnnnnnnnnnnnnnnnnnnnnnnnnnnnnnnnnnnnnnnnnnnnnnnnnnnnnnnnnnnnnnnnnnnnnnnnnnnnnnnnnnnnnnnnnnnnnnnnnnnnnnnnnnnnnnnnnnnnnnnnnnnnnnnnnnnnnnnnnnnnnnnnnnnnnnnnnnnnnnnnnnnnnnnnnnnnnnnnnnnnnnnnnnnnnnnnnnnnnnnnnnnnnnnnnnnnnnnnnnnnnnnnnnnnnnnnnnnnnnnnnnnnnnnnnnnnnnnnnnnnnnnnnnnnnnnnnnnnnnnnnnnnnnnnnnnnnnnnnnnnnnnnnnnnnnnnnnnnnnnnnnnnnnnnnnnnnnnnnnnnnnnnnnnnnnnnnnnnnnnnnnnnnnnnnnnnnnnnnnnnnnnnnnnnnnnnnnnnnnnnnnnnnnnnnnnnnnnnnnnnnnnnnnnnnnnnnnnnnnnnnnnnnnnnnnnnnnnnnnnnnnnnnnnnnnnnnnnnnnnnnnnnnnnnnnnnnnnnnnnnnnnnnnnnnnnnnnnnnnnnnnnnnnnnnnnnnnnnnnnnnnnnnnnnnnnnnnnnnnnnnnnnnnnnnnnnnnnnnnnnnnnnnnnnnnnnnnnnnnnnnnnnnnnnnnnnnnnnnnnnnnnnnnnnnnnnnnnnnnnnnnnnnnnnnnnnnnnnnnnnnnnnnnnnnnnnnnnnnnnnnnnnnnnnnnnnnnnnnnnnnnnnnnnnnnnnnnnnnnnnnnnnnnnnnnnnnnnnnnnnnnnnnnnnnnnnnnnnnnnnnnnnnnnnnnnnnnnnnnnnnnnnnnnnnnnnnnnnnnnnnnnnnnnnnnnnnnnnnnnnnnnnnnnnnnnnnnnnnnnnnnnnnnnnnnnnnnnnnnnnnnnnnnnnnnnnnnnnnnnnnnnnnnnnnnnnnnnnnnnnnnnnnnnnnnnnnnnnnnnnnnnnnnnnnnnnnnnnnnnnnnnnnnnnnnnnnnnnnnnnnnnnnnnnnnnnctgggtatagtagcctgggctggaatttgtgttctcttagtgtctgtataacatctgtccaggctcttctggctttcatggtctctggtgaaaaatctggtgtaattctgataggcttgcctttgtatgttacttgacctttttcccttactgcttttagtattctatctttatttagtgcatttgttgttctgattattatgtgtcgggaggagtttcttttctggtccagtctatttggagttctgtaggcttcttgtatgtttataggtatctctttctttatatttgggaagttttcttcaataattttgttgaagatgtttgctggtcctttgagttgaaaatcttcattctcatccactcctattatccgtaggtttggtcttctcattgtgtcctggatttcctggatattttgagttaggatctttttgcattttccattttctttgattgttgtgccgatgttctctatggaatcttctgcacctgagattctctcttccatctcttgtattctgttgctgatgctcaaatctatggttccagatttctttcctagggtttctatctccagtgttgcctcactttgagttttctttattgtgtctacttccctttttaggtctagtatggttttgttcatttccatcacctgtttgtatgttttttcctctttttctgtaaggacttctacctgtttgattgtgttttcctgtttttctttaaggacttgtaactctttagcagtgttctcctgtatttctttaagtgatttattaaagtccttcttgatgtcctctaccatcatcatgagatatgcttttaaatctaggtctaggttttcaggtgtgttggggtgccctggactgggcgaagtgggagtgctgggttctgatgatggtgagtggtcttggttcctgttagtaggattcctacgtttacctttcaccatctggtaatctctggagtttgtagttatagttgactctgtttagagattgttcttctggtgattctgttaccgtctggcattatgtgcaggaccatggtctgaaaatacaagaagaaaaactaatcgactttgtagggatgtcagaacagctaaggtcacccttagagttggtttgcatgaaagctgaggtgtcaggggtggtgacatgggattgagtccacccctgtcctgtttggtgctgtcttttccagcagcttattaatcttcctttacttgtagaacccctgtagagaagatctcttataagcatcacatgttaataaaaatcctatgtcaatgagctggaaatagacaggggaaaagaggcaagacattgtcaggaagagaggattctgggaaacagtgagggaataaaagggaagattcacccaggaagatgtgacaatatggacggactcatggtaactgagcataggcagccagtcacatggcagaatgtaggctggaataaatgggatattttaggttatgatctagtcagagaagagtctagctgtatggccaaggtatttataaatatattttgagtctgagttttatttctgggagcaagaaccagtacctaacgtccacaaatccctatctatactgctgaagtcatgtgcccaaagtacagttcctgtaacaacggaaaacatgatttaccacctcacagtgtaggaagttagaaacctgagagctgagtgtgagagagtatattccttctgcagacttggggaaagccggtctccaggttcctaccagccccctgagtgcagataggcctggggccctggctttctctttctctctctctctctctctctctctctctctctctctctctccctctctctcccatccctctgtatctctctgtctctgtctttctctcattctgtgtttctctgtatctctgtctctgtttctctctgtccctctctgtatctgtctctgtttctctctttgcctctctgtctctctgtttctatctctctgtctctctctttctgtctctgtttctttctttgagtctgtctctgtctctctctgtgtctgtctctctgtctctatgactgtctgcctctcttaatctttttctgtccctgtcactctgtcactctatctctttgtctctgtctctcttctctctgtgtctgtctatctgtgtctgtgtcagcttctctgtctctctctgtctctgtctctctgcctctgtctctctgtctttctgtctttctctatctccctgtctctttctctctgtcttgtctccccctaccccttctctccacttttgtcatattttatcatttttttctgggtttgaatgtcctggctttgtagatccatcactggatcactggggtaaggcccaccatatgcctggaaggctcttcatggcttcatcactgcaagtctttcgtgaccaagttctggtcataatattaggtggacgaggaaacccaacacagtgcctcatagggtgatttaagggctaaatgggacctgactggcatatagcctctgagaaacatcaatgcaaatgcgacttgatcactgcctttatctcatttccaagggggccaagcaatcagcttctcattaattcacaattctaacaactctgagctgtgtgtctacctcagccgttctccctataattataaattcattatgatttatagcatgattgcccacgacattctttaagccccgctccggttcttatgtttccacactcacagtgagtttatcacaccctgaaataagacagcagccaaggtcattatccacggcttactgttccaactctatctgtaaattcctcttaaagccgcagagcagttactacttagcatgcatatactgtagggatagctgacagatgtcatttgaagttgcatgtagggaccttagagttctcacagcttctgtgggagagacacagctatatcagggtcctttcagcaaaatcttactagtgtgtgcaatggtgtcagcgtttggaagctgattatgggatggatccccagatatggcagtctctagatggtccatcctttcgtcacagctccaaactttgtctctgtgactccttccatgggtgttttgttcccaattctaagaaggggcaaagtgtccacactttggtcttcgttcttcttcagtttcatgcgtttagcagattgcatcttatatcttgggtatcctaagtttctgagctaatatccacttatcagtgagtacatatcgtgtgagttcctttgtgattgggttacctcactcaggatgatgccctccaggtccatccatttgcctaggaatttcataaattcattctttttaatagctgagtagtactccattgtgtaaatgtaccacattttctgtatccattcctctgttgaggggcatctgggttctatccagcttctggctattataaacaaggctgctatgaacatagtggagcatgtgtccttcttaccagttgggacatcttctggatatatgcccaggagaggtattgcaggatcctccagtagtactatgtccaattttctgaggaaccaccacactgatttccagagtggttgtacaagcttgcaatcccaccaacaatggaggagtgttcctctttctccacatcctcgccagcatctgctgtcacctgaattttttatcttagccattctgactggtgtgaggtggaatctctgggttgttctgatttgcatttctctgatgattaaggatgttgaacattttttcaggtgcttctctgccatttggtattcctcaggtgagaattctttgtttagctctgagccccatttttaatggggttatttgattttctggagtccaccttcttgagttccttatatatgttggatattagtcccctgtctgatttaggataggtaaagatcctttcccaatctgttggtggtctttttgtcttgttgacggtgtcttttgccttgcagaagctttgcaactttatgaggtcccatttattgattctcgatcttacagcacaagccattgctcttctattcaggaaattttcccctgtacccatatctttgaggcttttccctactttctcctctataaatttcagtgtctctggttttatgtggagttccttaatccacttagatttgaccttagtacaagaagatagggatggatcaatttgcattcttctacatgatagccgccagttgtgccagcaccatttgttgaaaatgctgttatttttccactggattgttttagctcccttctcaaagatcaagtgaccataagtgtgtgggttcatctctgggtcttcaattctgttccattggtctacttgtctgtcgatataccagtaccatgcagtttttatcacaattgctctgtagtacagctttaggtcaggcatggtgattccaccagaggttcttttatccttgagaagagtttttgctatcctaggttttttgttattccagatgaatctgctgattgccctttctaatttgttgaagaattgagttggaattttgatggggattgcattgaatctgtagattgcttttggcaagatagccatttttacaatgttgatcctgccaatccatgagcatgggagatctttccatcttctgagatcttctttaatttctttcttcagagacttgaagttcttatcatacagatctttcccttccttagttagagtcacgccaagatattttatattatttgtgactattgagaagggtgttgtttccctaatgtctttctcagcctgtttatcctttgtgtacagaaagaccattgacttgtttgaattaattttatatccagctacttcactgaagctgtttatcaggtttaggagttctctggtggaatttttagggtcacttatatatactatcatatcatctgcaaaaagtgatattttgacttcttcctttgcaatttgtatccccttgatctccttttgttgtctaattgctctggctaggacttcaagtacaatgttgaataggtagggagagagtggacagccttttctagtccctgattttagtgggattgcttccagcttctcaccatttactttgatgttggctactggtttgctgtagattgcttttatcatggttaggtatgggccttgaattcctaatctttccaagacttatcatgaatgggtgttggattttgtcaaatgctttctccacatctaacaagatgatcatgtggtttttgtctttttagtcagtgtttctattcctgcacaaaacatcacgaccaagaagcaagttggggaggaaaggatttattcatcttacacttccagtttactgttcatcaccaaagaaagtcaggactggagttcacacagagcaggaatcaggaactgatgccgaggccatggagggatgttacttactggcttgcttcccctgacttgctcagcttgctttcttagagagctcatgattaccagcccggggatggcacaacccacagtgggtcctcccacccttgatcactaattgcaaaaatgccttacagctggatctcatgtaggcatttcctcaagagaggctcctttctctgtgataactccagcttgtgtcaagttgacacacaaaaccagccaggacaacatgtctgtgagggacatctcatgttgaatccacagcagatagcctaagatttatgaagccttccacgtaggacagatttttttaatggatggtataatgatgcacatatatgcatatgacccattcttaatctcctctaacttatcatgccagtagccagtcgagttatgactatgtagcaggcagttaaaatactggccactttgccaaaagctcatttagtatttgtgagacactaaaccatgtgttgacttcaggcagaacctttcagaatttaaacgcccttaatcaccaactcctcatgattttataactcatgattgggctctttcaattaggtagcagctgttgcctgttatcagaaagcatccagttcagtgaacagcaatgtaaatccaacagctgcccagactggccatgttagttctaggtgtgaatgccgtgcacagacaagcacggatctcccacacagaagcttgcatggagaaggaattctggaaggcaggctgttgttttgtgtctccagcttcctctccctgcataccccatcctgggctgagtctgtctgctgcatattattagcagttaaggggatggctaccatattggtaaagttgtcccaagcccactctgctcaggcatgctgcccaacctgtaatgtagactatgaacaccatagattatagtaatggaaaatgctctctctcacatttcctccttaaaaggcagtatgtgagaatttcatattacttaaatctaattctcttggggaaaatttggcacatagtacatgtccagggcagccatcaagatctgggttcaagaaccactctttatgctagagcactccccatccatcacactggtgatgatgaaaacaggcagatcctgtgctgagccttctcagtcagcctggttaccgttctcaaggtggcagtggcccatttaagtaggtggctattcctgagaaagaactctcccttcccttggaaacctgctgtcatagttaatggtacaaatgagatctctgatttctagtactccacacacggagattgtgttgtacttgaaactagggaaaataaaaaaaaaaaaaagaaaaccctttggttgagggaatttttgcactttctcaagccagatccatcaagtttcagatggctttgcctccaatagacaagctcaaatactccatatgaaaaggaaggagtggctggtgatgtcatgggaagaggtgcagtccatcagagccctgcaccactgggtagtttacatgctcagctgacaatctgcagactgtgttggcttctgacagtggagaaatgagctgttttacacggagggcagcgatgagccatctgtaagaccagagaatcatgtagtgcatacacgatatacagactggaatatattagcagagtatgtcctgtgtggagtcaggacacagagagtttctaggaatggacgtgtgaatgaatgcttatatctgaaacagcatctgcctacagcactgaacctggcctcttcaatgtccttgcccttaactccgaatcatccaaggccctcgtccatgtctatggcagcaaggtttggggttttctaaagtgacaagaacgcagagccatgacatcttgcctattgttgccctgcataaccaaaaagtcccttgagtatctgcaggtcctcttacccctgtctctggagcattcttctccacagttgcacctgctctgatttgttgctaagttcaaggaaattaaaaaaaaaaacattttattatttctctatttgtatttctttgcatgtgtggtatgctagtgcacatgcagaagagagcatgggatcccttggggctagagtcccgggggtctgtggcactcttggcctgctacatagatcttgggggttaaaatctaggcttcaagatctcacaccaagtgtcccttaacggtatctcaagctcctagggaatattttatcccacaatttattcatctgcaagtagcattgacctcactggccatttcttgcttttttgcttggtcctcctcaatggaccattccctgatgtttttccccctagctagtcttggcagaatttttctcccccacatgcattccatgcctccagtctctgtgtttgtctctttggacagttgtgacaaagcaccccagtctagggagcttatacagaagatcgtgtcatcccctgactctggagttggaggtcccagagtcatggagcagtgaacttgcttccccaagacttccttcccatttggtgacccaccatttccaataaggacaccagtcagactcaacttggaatctactcttataatctcatataaccttcactacctactttagagttctattgccaaagagtcccattgagttagggctttaatatataatttgatgggagaaaccaatagattattctctccatcttgctgtaacaaatattcagatcccatgagaggcttcaagtcacaacatgtgtggtgcccacatccctgccttcttctacagtgccacctacaaccctgccttctcctacagagtcacctacaatcctgccttctcctacagtgtctcctacaaccttgacttctacaatttctcctacagccctgtcttctcctacagtgtctcctacaaccccaccttttcctacagtatcacctacaaccctgttgcttgtagagaaggaaaattgccagacttgtgaagagatggtgctgtgtaggcagctagatcgcacagggctggataagtcaccatgaaagtggggtgtaggacaatagcttctttttgtggcaaatgcagcttctttccaatctgggttgtctgccctgtgatgcttcacctgtcctgtgtgtgcttctagtactgcagtgctgtccattgtcactcttgtggagttacagctcccaaatgttgttctaagtaaacttctcttaaaattacttgttcagccttaggtattatgttagcaacagaaaacatactaagacaaccttgacgcttgctaaacttctcacaccattacctccccatggtcttcatcataatgttttccccacacaaaggactaaccgcctggacacttggatagaatccttgtctggttgtattttcatcagattcaggcatactccttgtatgactgtactttcagcagactctggacaccaacattctcagcacaggcaagaggacagctttctgccactgtcctgatgatcccatcaccacctcccaggatctaatgtgacatgacaggatcgggaatctgttaagagataaacctctgggcttgtctatacggaattgtttggattaggttaatgagtttggaagtctcactctaactgtgagcaaccctgtttcaggacctgggaatcctgcaaaaccaatgggaggaagtgagctgttagcctgctggctgttcattgcatgtgaccccctgtttcacactcctgcctctgtgccagcccagccacaacacaccatgacacagcataaacctggctgcgtttacatcacctcctgtcaggcattttatcacagcaacaggaaagataactaattttatttatttgtgtggaaaaataaattagccaattttcgtgttgtttagagcaggatatggaaagtgctgtatagggacctgcttgaatatttttattattgggtgagagctaaagagatggctcagggatttaaagtattcactgctcttgcagaagatctggattcagtttccagcacctacaaggcagctccaaaccaccaataactcagttccaggggatcggatgccctcttatgacccctgaaggctcatttgtgcagcagttgattaacctgctcttttctcctcgggcagcagcgggagttcctcatgacacaccccaatgttctggattctcaaatgaaagacacacacacacacacacagccttatatttaatatgccttagtcaactcaatgaatgagccactctcaaacctccatgctgctaatgcctccccttggatactcctgagttattactttctaaatcctaaccttactatcctaaacccaatgggggtgctctgtggccactcttccccagctcttacatgattggtactctgtctttggcagctctcaagcttgcatcttattcttttcctggaatggctcattcatgcatatatatacatatacatatacatacatatatatatatatgtgtgtgtgtgtgtgtgtatagacatatattcacacatatacatgaacacaattaaataactatgtttgacagcacacgcctttaatccaagcacttagaaggaagaggtagatgtatctatgtgtgtgtaaagccaatctactctacttaatgagttccagaccagtcagagttacacagtaatactatcttaaacaaaccttcagtatcactgtgcgtgtgatatgtgcatatgtgcttgtatcatgtcacagtacatgtgtagacgtcagagcagagctctgtggagtctgtcttcaccttctgccttttgacatgggttccaaggattgcactcatgtctgcaggcttgcagctacctctctagtactggtcactgtactttgtcctttttaatcccatgctcccctcccccatcactcctgcctctctcttgcttccctttctccttccaggtgtcttcccttctgatgtcattggaatgtggtccagtaacctctcctgaccctccttccttaagctcacctcttctctgctcatggccccatttctatgtcctgtttcacaaacacacatgctcatatagaaacttatgtgtgagaaagcacactgtattcctctacatctagatatttgggtaatgcggtcatttccaggcccatctgtttttctgccgggacatgatttcacgtttctttataaccgaaaaaattttcactgtgtgagagaaacacatttcctttatccattcatctattgatagacagctggtgtggttctgtttcttagctcttgtggacaggaaatcaataaagatgaatgtgcagaaatctctgtggcgtgctgacttggagtccttcagacatatacacttgggagtgatatagcccagtcatggcaggtggactttcacttttgggtccccaccacgctgacttccatgacagagctgcttacaccccaatagcaatgtgagatttatagctgtgtccatgggtatttgattcacggatatagaatccacttgtcatgatgacctcacagtactcaacaccaacaccttcctgccaaatcactctcgtgaggattaatgtccccagccattctccatcccagtgagacaaccactgtcctgatgcagacccctaggacagcatcctcttcccccctccctccttcccctcattgtggtaacttgtaagtgcagaagctactgacttaactggtatcttggtgagattaaaacaaaaaaaaacaaaacaaaacaaaaaaatagtcaaatattcaaacattcttagtaacatttgtaagcaagaaatctttgactggtggacgaatggatttctgtggaaccagggtagaatgtaagatgatgaccacagctgtggagttttaggagacaacttttagtacctcagggaaatatacaaaattactctatcaaagaactatttacttcttattcaaatacaatggatattgcaaacacagttgaattttatgtcaattcaaaaattcttaaagaggagacttgatgtcacgtctgaccagcattgccatattctgtggaattcttccttgggaaggacttgagttaggaagtggtgggctctgctctggaacttctggtaagctaagagggactgacttccacaagaacacatgtagacccatgagctacaaggtgaagatagaagactattaatagaccagcaaatagaaagagggcagtattggtatgatgtaacaagaaatgcatgcttacactatacacccaattctccaagctcttctcaagctctgaagtctctgggtgacagacacatatttagctctaatgcaggggtcaggggggttcttggtggcctttgctgggggctggtcctaagaaagaccaagccacaattagaagttggtaacttcatttctcagggagggtagagggatggaaattggtctaaaaatagtcatagccacaaggaagaaccttctacagaagcccaaggaaaatgtgattgttggtaagagtgggcagaggcaaattcagcccatgaaaacagagcctgtgtggatacgaagggtaaaatctgaaacagggaatagaaagcctgccacaaagactttaatttggaccctgtcacttctagaaaattggttgtgaacacatcaagatcctaacccttaagagacctgaaatctattggaaagaggcaggaaaccaaggctgctggctctacaatggagatacccaaagcaaacaggaccttgagtagctgcagtatgggctctgtaagatagcatcttgcagcttgtttttcctgctgggactcacatttatttaacatgtgatctgatatgtaagaaaagtccaggtctggcaattacagaggaatacaatttacctccatgtaagaaagcaatttcatgcactttgtgcaagataccttgggagagagtaaacacgctgtgaaaattaaccaaagtccctgaacctcaggttgctcttgagtaatgaatggtacttataccctaggtactgttgagtgtgaatttgaggcttgtagctgtgacctacaactataggtattaccgttgattgtttttgtgcatcgatgaattgatctcactttaaaatccctcctgagaccgccatcgagtcatttgtaccacaaggaccatgtaggagcttcagcacaggctaagatgagagttctccacactttaagaaaatctgagtctctgtggcagaaccatccccttgtgaataaagatttcaggggaccaatcactgggtgaggagtaggcaggacttccgggtcaggtcttctgtaggtcttcatcaaatagattattacagtctgccagtaatggattatttaggcagagacccacatcctggggactctgctgcctttctccttcactttccctgaagctgtgacaacatagtgtcaagctgccaaaggtttcttgagaatgtgcaatgcttattataacccacgaacattcaaaggaagatggcgcagaaccattgtcgtgaaattttaaaccagtttacgaacttcaggtcataaactttcagaaaatgtatctgtatgacattttcatatcaaattggatttatttcatgctttgagtagacttcgtggtggtttgcgtatgcttgacccagggagtggcaatattgggatgtgtggccttgttggagtaagtgtgtcacagtgtgtgtgtggggggggcacttcaaggcctgaggagtcagacttctcctgtttgcctttgaaacaagatgtagacctctcagctcctccgcaccatgtctgcctagatgctgccatgctcccaccttgatgataatggactgaaccactgaacctgtgagccagcaccagttaaatgctgtcatttataaaagctgccttggccatgttgtctgttcacagcagtaaaatcctaactaagacagacttcaaaccatcttcattaaaaacgacatggtgctttgagttttttcttttaagtttgtttatggtattttatttttattgtaaagacacttcaagaatacattatggacactggatttactaagtaaattattgagatatattaaataattataaatgtatctattttaatatggtcatattagccattaaatgtagtatccatgtgtcttggctcagagagtaaatgtgcttaccaccaagacaagtggccagacttcaacctccaagacccacatagtgaaaagagactcagcctcagcaagttggctttagacctccacacaggccatggtacatgcacatacacatacatacccatgcacacaacacatacacacacatatgcacacagagatgagtaaataaatgtaataaaacgataaataaactaaacatgataagcagattctccgagacgtcattccttgcttattaaattaatgcttttaaaagaacccaagattttaccatgatcctgtgtcattgtaattaaaatgagtcattttacttgaattgccaaaaggatctctaagtgaatcaccagcctttattatcttttcaattatcacgtcataagaattcaattaactctcattgtcagaaattacctctgctgaactcagggaaaaaaaaatcacgttttcttgttttcttattaactgccctttcttatcaacagaacaatgtacacagagtctgtgtgatgtgaaagggacagacctaataacagcagagaacttacttgcaaaagctggcaccttgcagcctgaacctgagactctgccactgccaacagttctttttcctagaggagaagagaaggtcacagaggatagggctgtgtagatactgctcaagttgtgatacttcatgatgatgatggtgatggtgacagtgatgatggtggtggtagtgtgtgtgtgtgtgtgtgtgtgtgtgtgtgtgtgtgtgtatagttggtctagcaacccatgtaagaatcagctgtcaaggaatgtctgactttctccaagtattgatcaaaagcttcccagctcaacataggaagcccagtgtctaccactatctcctctctgatgtcctaatgtgaaggtgggcttcaatgtcctgaactgtggatgtgatacaaatcctttaataggatgagcctgtccaggctcctgggaaaccctattcccatgtgtgaactcttgggtgatggagatgttgacagtgagagcagccatcctgagggttttttccctcagcttctcccttctctgatttcttttgcaagtcaaggccatctctgttccctgtagtcagctttctcccctggggactcagcaggccagaggtggacagctggctcatttgggtcaaggtctttcctgtctcatccaagtctgcaaggtggagagtcactctccctaggtatgctcaactaaattctggtctccctcatcccttctatttaaagtcctaaattagtgaatactacagaacttgagaaggtagctatcgacccaaagctcgatgtctggccaatgcttactctgagcaggtctgagctggaatgagctggattctgcttgatgaacaagagtaatctagcgcacagggctctcttctctgtttccttcttccctctgttgtgaaccccacatgtcagtgtcaagaagtagataactttctatcacactcagaaatcacctttcctttccactgtgctcagggtcaagatttttgtaaaacagcttcatcctgctttcaccctgccccaggttctctgctgcaggtgcctgtgtttatttaaatatgtcttgcacctgtttgcctacacgccttcctcacagcatcatcttcactacagatgctgtcttctgctcgctttccttctgcagcccccaccaagtaacatgtctctaaccaagaaactctcccaagtgtccctacatcccatttatcctgcttgctcttttcctaactatagtcagtaaaagttcactcctagatgaaacaaaattccttgatttatttatgtgtttccctgaaatcctttagcagcctaattgagtatctgttgatgggaaacacctcagatttagtgccttagaaccacttatcatgctcaatgagtatgactgggcacagctgggccctgggcttagggcatagaagagactagctcaatgtcagagggctgtgacctcctactgagggcttctctggtagagactcagctacctccctgaagaggtgaccagttgtcttagctaggtttatattgtagtaatccaacatcgtaacaaagtaacttggagaggagagggtttgtctggctaactggtaacagtctgtcatccaggaagccaaggcaggaaccaaagcagaggccacagagaatgcggcttactggcttgctcctccccctcacggtgtgtttatcctgctttcatacaatgcaggaccccctgtccaggtgtcactgcccacagtaggctgggcgctctcacatcaatcattaatgaagaaagtgctccacaggtatggggcaatcatgtgaaggtattcaagtcctctctctctctctctctctctctctctctcacacacacacacacacacacacacacacacacacacaaggatatgctgggtgaatcttggcatctgtatcatgaatgccatatcttcaaatcctctcccattcctgagttgctcaaaagagaacttgaggatggggtagccactcctgactctctagtgtgagtccatctcctagtccatcatgttgtaagtctatctcctagtccagtattgtgtgagtccgtctcctggtccatcatggtgtgagtccatcttctagtccatggtgtgagtccatctcctagttcatcatggtgtgagtccatttcctagtccatcatggtatgagtccatcttctagtccatggtgtgagtccatctcctagtccatggtgtgagtccatcttctactccatggtgtgagtccatctcctagtccatggtgtgagtccatcttctactccatggtgtgagtccatctcctagtccatggtgtgagtccatcttctactccatggtgtgagtccatctcctagtccatggtgtgagtccatcttctactccatggtgggagtacatcttctactacatggtgggnnnnnnnnnnnnnnnnnnnntggtgtgagtctatttcctagtccttgtgtgctcacctgttctgcctctgttctaccatgctggactagaagatggactcacaccatttctctgtctcttgtctctctgtcttcctgcttccctgatgttgtctccatcctttaattccagaggaatgtgacttatctgatttctctcatctgcctctctaatcccttaatctcccagcatgctgtgtatcttgacagtcagctgtagaccagccggtagtttccagtgtattacaggcttcatagttgctaagtctccttgatccaataaaagcctaaaccattatcttttcttagttggaggattacctgccttctgctgtacatggaaagtctagatacatttttattacaaattattttttcataagccttggtaggtaattatggtctagaaatagattgctgacttggcagttcaaggttgtatccttaggaggaaaaacagactttctgtaaggctagggttaaggctaggcacagacagataccagctgtcatggttagcaacatagacattgtttcagtaatcatgaaataactgaccttgttagattaagtgaatgatagtggattttctgttgaggaaacatgaggaagaatttaacaaatgggtcagaactaggagataattagcaaacttttcaacttgtgacacttgaccttatatttgtgactttaatgagttttcctgtgtagtgggacacccctatatatcaccacacgggtggtggtaaacccctatatgtcaccatctagtggccaaatatgggagaactggactcagaaagaaggagatatagggcataagacagccttagcaaacttaccgatggatttgtaaagttagattttggtgtcacttaaagagcaatatctcatcggctagctctctagtgtagtatgtcaaaggcccacacagtttaatccccaggatggatggatggatggatggatggatggatggagagaggagagagggagggagagaaaacaagatacagatgttggttgatttacagaagtcagaatactgccttctttatatccttttaaattttaatttcatgtatgtgtttgcatgtatgtggatttgtacatgtgtgtgtgtgtgaaagagagagtatagattgcgtacatgactatatgggagtaatgcagaggtcagaagcaggcattagatcccatagcacctgcatagcattggtgctatgtctggattattatgttgcattgagagctgaaggcagacccctcaggttatacagcaagctctgttggctgttgatatgtctctcatgctctgtatgtttgaaataacagaaaggacagtgtagccttcgagggtaagtagcctatagtcaacatgagaagaggcagagacagagaaggtggaggcattcagggatggggagatcaaaccagtcactctttggggggatgtttttgctactctttagtttttaagtaaagattgatttcctcttcacttccgaaaggtggatgattactcattcagcgatcgctgccacttgggtatctactcaaatttctgtctaactaatcctttgagctgacacagtgactttcaccctgccctctgatagttattgagtgtttgataaacagaaataacccggagggcagggctattctagtcattctatctgtcacactctgcataggatgggacttgatttagatgtcacctctatgaccacagaggagggacccttttagacttgaggcactgtttcccttgacatttcaggagctccataagcctgactcactggccaagctttgacacgtctgaccttctcttgacatttggtggaggggttttaaaggtgaggatactgatgctaagtcagactctggcaccaggaaaatctctctgcagcacctacagttggatgagtggctccattcatgcacacaccccagtatttttttgactcttcatgagacaggagtgttctatgaaggtctgagaccaacagaggtgtttggtattcaccagccaaacccacgcacttcacacaatgtcgggtcttaaaaaccagctaagaggcagcagagagtgaattgattaaaatgaagtatttgaagtaagacataaaatactgctgatctgccgctgaagattcactggcttttccctgtgaagacctattgttgatcattgatagatagattttttttttctggctgtggaagggttctgttaaggcggagacctctgtctgacattgaactagagttgacagtgccctaagggctcttttttttctctctttcctctctgggtcactggtgacctcccttctgtgtgagcatctctgggggctgcagttatcagggctgagtgaaacatatgtctgaggataaaaagaacgctgtggcatgtggtgagatgcaggaaggaaagactgaagttgcaccctgggaaataacagtacaagttctggttcacttgcctctgcacggaagccatagagaacaggagtaatcacctaccagactcacatgggtgtgagaccccccatggagctcttcctagggcatcagattcaacctccatgtacaatctgttctcacaagtcattctgaaggcctattggacatcagcaaacagtggctatcatgtgggtcagaaagctgaattactccacaagtatcttcccttcctatgtcagaattcctaaaaagcacacgagtcaagagtcatacaaacgagactgtttatatcaattgtatataaggacagtttgtggttgtaacacagcaatttttaggctatgtatggctgggtgtggtgacatactatcatcatcacaggacatggaagccagggacaggaagatccatgtaatatttgtcttctgggtctggattattgacataatgatctatgctctttaattctaggcaaaattaattgatgttgactctcttggacatatgagtgacagctggggttgctcactgcagggtgccaagtgagagctgtctgacatgacagatcgtctgtcactgtgagctacgtgtggcttacgcaggtctactcacaagcacaaggaacccaatgtgcatttaagatttgtgcatcttactaaaggtaaatggtgcctcagtgcaggaaaagcctctttggcttgcaacaagggctcatctgtgggaagtcagaagactgtgttgtgaacctcaccgtggactctttatccccagtgtctgccatttaccagtgcccaggatctgatactgtaacactccaatgatctcaattaccaacctccacagcctgttctacgttagctcactggggatttcaagccttttaaaccatgctatcctgacacaaactcggtcttctgtccaccatgtgctctcagtgattaggtcacaggtgtttccaggttcttgacctcaaatccagagaactgaaaatcagggccacacaaatttgcaaaagaaagaggtttcttcatccagagcaaaatgatagagcagattaacaaggcacagtcaaaaccgacaggaggcacatgtgtgagaacacacaagggcccacaagggacagtcaaaaccgacagggggcacatgtgtgagaacacacaagggcccagattggtgctcggggctcttgttgtgggggtacaggaggattgaagtttggttacataggatgtagttttgatgcttctctggtttgactgacaggttagatctgcacatatcttttcccatggtgcatctgattttaatcatatgcatgcccaattatccataggcataggagggtaaataggggggtttccctgaaagtttaaagagaggtcaaagttttccttacttagcatgtacctcaaaacatttccggctgccaaatcctgcttggccatgtggaagggatgatgtggcatggttttgggacagagccagcagggtgtgaccctccacaaatattgagagctgctgggtgtaagtcttgtttgtgtgtgtatatacatgtgcgtgcgtgtgtgtgtgtatctcttcatatcccttctcaagattattagggaatgttatctctgccaaggttaatgaccatgacaatcagagtcagcacaagtccaggaggatgtgtctatgtttttatagaaaatggcagaacgctgataacttcaggatagcctttaaggctatgataaagaactctgaaatcatgacttcaaaatatatatgatttctcaactatgcaaaatataagggtgttatatgaattgtttaaggagattcatggatatagaagagcagaggcagctgtactgtgagccagcttgtcagaaagatgcaaagacagacagaaacaaaggcaggcagattcttgagttcaaggtcagcctgggacagagctcagttaggcccaggcagggtaggaatatgatctcagagtgagataaataaaagatctgggcttttgacctgcaacagattagctatccagagagtttttggaactgcaagaaagagctctctgagcagagagctgtctagaaagctgttccaagcagaacacaggccatgagtttatactccacaatttgacttcatcttttttttttttttctgctctcaaacatgccttctctcaggaatccctctccaagccaaagttgttccttggcatcagtccagattagcctctggtcttcatgcattgtgaatacacttgaatagaaatgctctaaatttgattgtttctaggtgtggagaatcctattttattgctcagggatgtatcaggtagaagttcaagggacttatcagcttgctaggtgcattattcaagaagggatgtatgcatagtgtatgttggtaaggagacgggctgcccagtgcattattacaagaggagtgcatgtataactcaaagcaaatagggtccctctctatactaacacctatgcttagctgctgaatgtggacaaacacaggaaatccagcaaagcataagtcaagtttagggaattttagttttgaaataagtttaaaaaacaagtctgtgatacatttgtaacaaacaaacaaacaaacaaacaaaccctatgttcagtgtttgccatttaacctgcttggattgcatggggcagagctacaagggcagctgtagaatccagccccagccaaacatgctccctcaggactggcactcctgccctgaatccatgtgtggtgcaggggtgaggatgaggtgtgtgtgtgtgtgtgtgtgtgtgtgtggtgcaggggtgaggaggatgaggtgtgtgtgtgtgtgtgtgtgtgtgtgtgtgtgtgtgtggttcaggggtgatggtgaggtatgtgtgtggtgcaggagtgaggatgaggtatgtgtgtgttgtacaggggtgagggtgagttgtgtgtgtgtatgtgtggtgcaggggtgagggtgaggtgtgtgtgtggtgcaggggtgagggtgaggtgtgtgtggtgcaggggtgagggtgagaggtgtgtgtggtgcaggggtgagggtgaggggtgtgtgtgtgtgtgtgtgtgtgtgtggtgcaggagtgaggatgaggtatgtgtgtgttgtacaggggtgagggtgaggtgtgtgtgtgtgtgtgtgtgtgtggtgcaggggtgagggtgaggggtgtgtgtgtgtgtgtgtgtgtgtgtggtgcaggagtgaggatgaggtatgtgtgtgttgtacaggggtgagggtgagttgtgtgtgtgtgtgtgtggtgcagggnnnnnnnnnnnnnnnnnnnnnnnnnnnnnnnnnnnnnnnnnnnnnnnnnnnnnnnnnnnnnnnnnnnnnnnnnnnnnnnnnnnnnnnnnnnnnnnnnnnnnnnnnnnnnnnnnnnnnnnnnnnnnnnnnnnnnnnnnnnnnnnnnnnnnnnnnnnnnnnnnnnnnnnnnnnnnnnnnnnnnnnnnnnnnnnnnnnnnnnnnnnnnnnnnnnnnnnnnnnnnnnnnnnnnnnnnnnnnnnnnnnnnnnnnnnnnnnnnnnnnnnnnnnnnnnnnnnnnnnnnnnnnnnnnnnnnnnnnnnnnnnnnnnnnnnnnnnnnnnnnnnnnnnnnnnnnnnnnnnnnnnnggctacctgttactgacattaacagaagcaggcacaaggagtgacattcaatgtggggtccacttctaaacacatcctaaggtgatataatacagttttatgatattcgtaagggtctgagaaaccatgtgctcctatgtggttctcagaaaagcacagtggctgtcaaattaccaagtactcattgattaattaaaaccctttatgaaagaaagatgtcataaattaactataatcaagggaactatggtgaccctggagggtaaattagattcatcattagacaatcattgtacaggaacaatagtcaggtaccaaaggttcaaagaggaagtggaaaccctttaagccaaaagaacttttttgttttaaaactcggtttgctgggtgttttcgctgattcttctcggtgtttgccctccacgaatggatttcctccccagcttccaaacctggctgagtagtcattttcttctcacttatataatcttattttcatcagtagtatttaactatatcccaggttacactgtaaaggactgatgcccagagaagtcaaaaacacattaagtactgctgttggtatcctggggtgtgcctcttgatttctggcttgtctttaggtgttagtaacgacttcaatatcgacatgtttattccctgcttgcttgactttacaaaggctttatgtttaagggtatggaggggagattggggtatggtatatgagaggatggggtgggggagtggagtgtgagtatgggtttttagtgaaagcaaaacatactttaatagctttgacaaatatgagaaggactatttttcattttgtttgcactatctcaagatggaactataagttagtagccaattgatctatagacatagactaatttgcataaattactagttgtggagttctgaatctcattgagttgatctgcaaagtgcccacccctgtgaaccgtgggtgtcttctgaacctggctcagagtaagaacattttgtatagtataactcagaggagagtcataaatagggagaaaatgaagcctgaaacttgtgtttacttcatgtgcattctggatttactgccgctgctctgggctccgaagaaatacgaggaccaatgtctgtcattataaaactgtcattcctgtgtgttctggagtatttagagccatgttgatttaaggccaggtctagtacgcaggccattcctaattcccaccaggcaagctatatgccagcactatatcatcgaggatatgaggaccaggcaagtttgataatgaccttgtaagataacttttcatcatataaaagtttgacaactgaagcttttacacaattattatcactcagcctagtattagctgattcttcttgcgggtagtaaacattcttaggaccacatataaatgattaaaaggtaggagggtcactaagaacccgcccttcaaagaatcaacagaacgctggaaaaagagaaaaacaaactattctggagccttgaatgtcagcacaaagcttggcataacccagattttaacattcgtgaatctcaactacaacagtacaagctgttcacagctgccagtcacaacccgggtcactcgcgcttccactggccacatggcagcctttaaaaccaccacccttaccatcccgaaagctatgaaaacaatctgtcctgcagacactgatggaagatttccaagaaggctggtccccagatgactgtcatttttacctgtctgcaagtttcctggaaatgcaagctcataagaaagatttgtttttattttacttaatttaggggaacaaaaacccactacaaatcttttcctgggggcatttgcagagaggaaccagcagtgatgttcagcaccacgcttgcctgaagcagtggcgacagctgtctcagagagtggattaaaaactgtgaacgggggagtcagaggaaggcaccggctaagggatggtgtattccctaggctgttgaggactagacacatatcccaggctgcggatgggctcttaaaacactcaagaaactaatgcttttcaagggcagtgcagactgggaaaatgttagccatttacaagcacaccaaagaaatgccctaggtcaagtttctctgcaaatgctggggcagctaaccaggcaatgtttcagtccacaagctggtactgtgacagtgagcagagacttccgtggctgtgcatgaccaaggatataataggtattaagggtttcaaaagtagtgaaataaaccaataagatcacaggcagagaggctggctgtcctggaaggaaagtgaacatgatttcaaaggtcttctcccattttattctttgtaatgtcaagacttcaacaaacactctgagaaatgcgaagaaacaagccagtttgacccacaaagaaaaaaaaatagatctaaaaattacatctattcctgagcaatcctagacagtattttttttcccaagagagactttaaatcaattattatttgatgttcctgtaactaaaggaaacccttttctaattgagtatgggaagttatggaggagaataacaaccagatactaattgtaaataaagaaccaaaggaaagagaaattatgttatttaatctaaaaataaggcaaaaatccaaaaaagaagctaagtgtaagtcctctattgaaaaggacagactgtgagatcagacacagtggcagcagaggagccactggtgaagttagcagccagggggaacgtgtagctcaggggaatgtgtgaacccatagacaagaaggcagaggagcaggaagagagctattagaagccagaggagaagctgtgtgggtgtgatggagggcactaactacacattgaagaagctctaggctccaggtagaacaccgtgaagcagagcagtgcttatggccacactacaaagaggagctacatctagacactcatagccatgctacacatgatacacagccaggctcacatagccataatgcacaaagaggccatatccaggagccatgatgcatataggagacacatctagggacagcgtagccatggtatacagaggtgttacatccagggatagtttaaccacaatctaggaaccacataggaaccacatctaggcacatgtagcatgatacacaaaggaccaacatggttgatcttctaatgatcaagcgaggcatttgctctcttcaagaatcccataggatctcagctgacctcatactgtgaatccagaggtcagaagactgggagacagatcataagctaacagaaggactgtcaagaagtatttgtttgtttgtttgtttgtttgtttgttttagaaagctatctttcagatgtaggaataattaaggcattcttgacaaactaaagctaagaactgtggtgaacagatattctggattgacatgaaagacatgactgttgtgttcacaggacaagctcaccaaaatgaagtgacagtctaaggagtgctttgttgctttaagtttatcctgacctttctagagatatatgcaaatctgcccatagtgagcaggcatgtatgcataagggtcctttgctaagtctaaaggcctgaagttgggggagacagggatgcaggaatatccagcatttgttcattgctgaaccttggtcaacagtaattaatgtaaattacgttggtatgcattaaaatattaattataatcctaatgaataattcatctgaatgtttgtgagttgagatgacaatatgtaaagacctatttacacaaaggaagaatgggtgtatgcacctgtctgtaatccaagcccccaggagaggctgagggagggtcatgggtttgcagtcggtgtggactaaaaagggaagaaaccatctcttataaaacaaagcaacaaaacacaaacagaaaaacaaagctgaagagaaggtgcaatagaggcttaggagaatgaaacattgtataatccacacagcaaacaaatagcaagtgtcagatgtgagtcccactctctcaggaactgccttgatgaacatagactaacactcaaggggcagaaatgggaagaatgtatagaaaaccaagcagttgtgtcaggtctgtaaggaacacttatttagacatcagtaaggtcaaaacaagagattcacatagatacatcaaaggacacaggaaaagctggagtggattgccagctgctggggatgtggtcttcagtaggaaagttaaacagatgtccctcagcttcatgtcctggctagcattggccactcatttgctacataacctgctcccagttacacagttactcattctgaaagttctgaatatttaaacagctaaaagtttcattgtcagagctaaatgaaaacacagcatggaagggggatcccatcttgaagacaaggaaattatattataaccacacccacatgaagatccaagacagatgagaccaaactgaccattggaaagggaaaagcttgccgaatggtgtgacgtcagtagtattgtagtgatgggtggggcaatttcacaaaagtcagacgcagaagtcttaacggccactcaggcagctgtgtgcaaggctctgcctcctacaccagcaggccacacacttccaagagcttatggacgggccatgtgacatactgcagagggagcatctggatacatcagaaggatcaatacagacaactttgttccctactctcctgatggtgaaattagaaacctttcatggggattgtgaaggaactctggaacagttgcctaaaattatgtcctttccccaattcctctgaagggcacctgacctcatgtcttggttacttttctgttgttgcaataaaagatcatgaccaagaaataatcttataaaagaaataatctaatctggtttatgaaatcagagggttagacttcatggtggcagagggacagaactcctgagagcaaacatcttgatctacaaccatgaggcacagagaaagactcagtgggaatgtggaagtcttttgaaatctccaagctgcttcccttggcatgcctcctccagcaagatcacatcttctagttgttcactaacactccaacaactgcggaccaggtatgcaaccatatgaacctttggaggccatcttcattcaaaccaccacaccatatgcacttcagaatgtgactaattctcaatgtgtctcgttttctgaggtggtaaattaaagtaaagagatttggggcagggaggcaggaagaaaaggacaaggagggcagctccccaagatgtcttcttattcccagaagatgttgtaaggagaaactgcaggaaggcatggaatggctatctcaacaggactgatggagtgagaggaacacacgaaccctacaaaacatcccagccagcatctatttcagggcttccagacttaggctctcccatccttaagaggttgagttatacctttctttctctgcatcctggtcttcagaatatcctggatattcaatatagtgtcagtgtatctgggaatggtatcacattgacaccctcactgatgtctcctggcacgcatccactcctcatcaatgtccctgccacagtggtgcattttcacaactgttaaactgtatgaagtcatcagtacaggccagagctataaatgcctacagcagaaaagcatatgaacacccaattactgaacttcccacatttgagaataaaaaacagtaaagcaacaggcaatgctcatgaaaggtatacactctggggtagaaacaagagaagtattgagaaaagcaacattttgaaaataaaaaatgaatggttttatgaatggtcaacatacttgaaatatccttagctaaactgattcacattttttcaaaaaatgagaatgaaaggaaaaattcagacgacaaaaatcaggaatgaaggatggtgagtttaagttccatgctaactaaaagagtaaagtgagttaaaatccattataaagttgtatgccaaagcttggctgaccacatgagattgaaaacctctggagtggcacaagttgtcgagatcaaagcagtcaaccagtgcagactgagagacgacggcaggcttcaaggagtgaagacgctgtgttgctgtcttcccacagtgaggccagcacaggttgcttccctgaggaaccgtgcagtgactcaagagaggctaacaaagctgccgctgcttccagatacgggagtacaggaaccatgacaacatgatgcacgaggcggtattccctgaggtaaaacacagagccatcatgtgcaagaagaaaggctgatggggctgtgcaaacaacgtcagtgtccattggctaggctctgggacccttccacatggatactaagaacctatcctataaccgagtgggtttcacaccatgatacaaggccatggctatgtatgaacagccagtcagtgagacacagcatacccttaacataagcacaatggacacattcacgccgtgtgcacagtgtgcccaataaagcagaaaccctcgctctgtgttataaaacaacttggcatcattgcttcaactctgcattggtcattttagggcttccttctcttcattattttattgctttcttactttatttacttacttagatgtttttctgtccacacactcatacatcagagaacaactgtatggagtcagttcttccactggggatcaaactcaagtcatcatttctggtggccagtgacgccacctagtgctatcttgataatttcctctcaactttttaattaattaaagacaatgcttcacgatgtagatgggctggtatttcagacatgtgcccagctttcattttttaatttaatttcaacattattctattttctgtgtgttcttaattttctctaaatccctttaattatcataatgagtatagggaaatagctaattctaaagtgtttggcaataaacaatgaagtatatccggtttattatacttagctattacagacagtgttaattgctgtcctctggagtctcttctgaaaattgctgagtgtgcaagagtccatggagcttgacactagatcttcctgatacaccagaatcaagtccatactctgtccgccaatggctgtgtccaataagtgccgggatctctgaacttatacatggagatgctacaacagtctcttaacactggggagacagcatcttatttttatcatactcatgcccaactatgcatagaaataagatagtaaacataagatttcccctaaaagttcacaagtttgcttgcttgtatgcttcccctaaatcagcatagtttatcttgaccccttgtccagagttcccagactgtgagccatgatgtgtttgaagtgaaatattatcaaagggttactaagggcagtaacttaatttcattgtttgaagcaggtatgcctgcaagccttgatgcagatatgggtcctaggttgcctgcaagtatgtcatccaagactagtggagtcccgggtggctaagctatcctttatgcttgcttgccttggtcaattctctcagaatggtggcagctggcaatttgtctacagacctgacacctctgaggtggttcctcagcaaactggaccttgaatttgaaagcaaatcctagactaaagaaagaacatcatcatgagatgaaagtcacttgttggtgaatagaaagggcatgttctaggaactatgtgtaggaagttcttcagggaagagccctggagtagacaggatgtcccttcaaaaggcaagggcaggtgaagctcgtgcttcctcagacagcaggcctgcgactgatttctgtagtgaaaacaatttgggcataaggtgctttgactggagaaaggcttgagggcgggcactctaggcctctttcataggtcctttctatggcacacactagctgacaaggtggctttcagtgtctggagcctgtacaggagctgacaggctgttgagattgcatgtccttgtggaatccctcagagtgagggagacagcaagagaatagtcacctagaggcacggatactggggcgaatacagagaacagcaccttcagttcagatttcaggtcatagagaagaaatttcgtagaaaggcctgggtgattgaaactgaaccatgctgaacagtgttgtcacagttgagcataagagaggctcttactggaactgttagctcgtggctaaaattcctgtcctggggaggctgaggcatcagacagagaagctcctgacgactggctacatagaatcactgacccaaagatacagcagcaataacaacaaaacctaaacagcagcaagggcagctgctacttggctctcttttgtggcaagtgcctcagtgatgtttttctaaccatggatatatgagtagtggagaccagtggggtgcctcagaatctaaggacatttctaggaggcttgtcccatcagggtgctataagcatcagagactgtagcaaatctcaaagcctcctgatattgcatgtactaacaaactcaccttgctagcaaatggacacacaggtcgttttccggctgttggtttgctctgataattggtatatattttgatctatgtgactttatggctttgtctcaaaatggtctgtgacagtaaaagaatcgtgggcaagggttaatggcacaaatggaggcttaatgtgcaaaatgcaaactttcgttgcttttagccagtaggtcttcgcaaattgcaaaacaatgtcttcatgaggctaaagagagtcctttttacttatgtgttcttttgtcctgcgaaggacatataaactcactcaactctactttctcatcaattcctttggctatagtgggtaatcaaacttccatatcacgtaacaggtttgggcacaaagagaaacacttgtgatcatatatgtgtagtgtgggaatctgacagtgacttgtcctcaccccacggcccctacagctattgtccaagctgctactgaaatatagccattttgagctcagtgtggggtgtgctttcttcaattctcttttctctcttctcttgcagtgcttcaactcttgaaggagggggcagatccacacactctcgtgtcctcaggagggtctttgctacacctggtaagaactggcacttgaaagggccacgtagtaacacctggagacaggaagcaaattaagtattcaaaagtcagttccaggatgagtattcaacaatgaccagagaacaaaattggcacatttcaggtgacaggtgtcgctataaagctcctgagtttgatgttctgagggaggggaagtcactggatcctagctgacctggggaggagtcgagggaagaagaatgtcaagtctcagctcgctctgcagtttatacccactgaaccttttatctaggggacacacacacacacacacacacacacactgtccttgcttctgaacagatcttggctatcatggtcctttatatgttctcagcaagtgaggctctgagcactcagggcacactgaaggagcacaaatgaaagactacctagaatacagtgctgccctggctaatgcagatggagttactttagatccagtcaataggtcacaaaaattcagcaagagtacagcaggaaagaaaggctgtgttgagagaggtggtcattgtgatgctgttgtggatgcataggttggctgggtctgggagatgtacagatatacagatgggagatgtacagatgtacagatgggagatgtacagatgtatagatgtacagagaaatccactgttgctgctcaccactacactctcctttagcagagaatactgagtaaataaaaacaaagggacaattgcaggttgctagagagaaaaaaattacagggtttctgaatgcctttggtgctgagaaaggcaatttagtcatctagagtgccaagtgtgaacagccacgtggagagcccagccttagggcatcccacactgggacgcctgatgctccgcagacctggtcctaattacatactgttacactgttgtcttgacaggaggcagcacagtgcgtgtacgtgggatgcaaaaaagagctgtagtgttgggctttcccacagttgcatttatccaactccaatattactcttcaagacatttcttcttagaagaaatatttatatgggattaaatgtcccaataaggctaaggttgatatagattccacagaaagggtaatatttggggttatacatttttaaccttatagtacttttgggggggttacatgtctttaagtttttaataactcttttgtaaacacatttgtctcagtctctctgtctaccagttcttaaaaacattcctatagcaaacaaatggtaggtgtcaaatactgtatgataatattggaaatagtggcaaaggcaaccatgtctgtgcccctccagggaactcatctcatgctgacaatctagagggaccctcagaattgaatctctgtaagaattatggagtggagagtgggattacagaagccttgatgaaatgttgtgggtttgtgacattgagtttaggtcatgaactaagagaaggattgccagcactcacagaatagagagtgatttttagacatccccaatgctttcctgtggcattcttgcaccacagtcaagctgaagtgaaattccatggaaattagagatagccttattccaatggattctcgctttaatacaaagatagggagtccatgtcaggatggcgacaaaaatatccaagacacacagaaacacagaaacatagggtagagaacagagtgtgaaacataatggagtagatgatggagaagaagggggagggatagatagatagatagatagatagatagatagatagatagatagataatagatacagacgaaagatgttggatgaactgacagacaccagaaagaggtaaaaagaggggcagtgatagataaagttatagatagtaaatagagaggtatatgaaagattgttgagagaggtcaaacccatagattaagaataaatagaaaatagatatacaatgtataaagaggtgatagacacatggtagatgatagatatgtgatgtatgattgacagagaatatggtgagataaaagataatagacaggcaggtggctaatacatggatgatagattgatagaggatagatgatataaagatgaggaaccacttagaacgaaacataaaaatgaaagtatggctccagaaaaaccaagagtgaactcaaaacttatccaggcttaagtttccctacactagtgaaatatacataagagatggtgtttataggctgactaagttctcttatgtgagaggcagggaaggaaggctaaaaagaaagttggagacctggcagtgaacaagttaaggagtttggtgactctgggttggtgctataatcaggtgacaccccccccaataccaaccgagagagagagaagagagagggggcacctgcatctgacagggaaacacaagattgcttgcttcatgcagtgcatgctataaggtaagaggtcttttgtgctgaaggtcattgaccttgaataggacaccagatctggtccttaaaatgctttgtctttgaacaagagacactacattttatattatgtgaagtccaagtggtgagttgttcttgacagctggacagagagtctggaaacatgacaccaggtgacaggacagaaatgggttccccacccctgctgatctagggaccgtcttgctcattgatgccatcttggctaggtaaagtgtcatcacacactggctgccgtgatgtgatcaacatggattgagggggagcggtgctagcttgaggaaaattatttctagagagcatgagctttgctaagcagtgataatattgtaagaaagctgctacagggatgttaggcccgcgtaatcttttcagacaagtgtgattaaaggtatttattgctgtcaaattattattcataatccttagaagtgtgaatcgcaaagtacatcactagggaagggggagtgtcgatttcagctttgcatctaattaactttcttattctccttgaaagactgtgaagttccaaaatccaagtacgattggggtataagtgtgaatccccatactctaagtcagggatgtctttgtgttcagtgtgtgtgtgtgtgtgtgtgtgtgtgtgtgtgtgtgtgtgtgtctgtgtctgtgtctgtgtctgtgtctgtgtctgtgtgtgcacgcacacacatgtacgtgcatgagggttgaggatacctacatatgaatatgaagtataagtgtggattctcaaggtccctgtcagagatatttttgtgtgtttgtgcatgcagtgtgtacgtggtaggagtgcatgcatgtgagtgtgcagtatacatgtggtccatgtcatcagggatgtctttgagcttgtgtgtagttttgtgcagtgtgtgtgtatgctggggtgtgggaggtgcatacatgagagtgtgaggtatattcctgcctctgtatgctacagcagggtggtcatgtgtcttttttttaatgatttatttttattttttaatgtgagtacactgtcactctcttcagacacaccagaagagggcattggttgtgagccaccatgtggctgctgggaattgaactctggatctctggaagagcagtcagtgctcttaaccactgagccatcttttcagccccatctcttcatgtgtcttctaccacactctacctgatctctatgagaaagagtctctcactgaactggccagcaatctctcaggatacaccaatcttttcccttcttttccccttcccggagtcctgggatgacaggcatgtcaagtcacacctgaccttttacatgggtgccatgaatttgtactcagctcttcctgcttgcaatgaaggcattcttccccactgagccatctgagacaaccgccaagggtatcttaacagctcattcacaccatcactgatggtgcaatgagtgtccaaaacaggaagaaaagggaagaatcatatggattcagctcccactccgaaccagcttgttggggactgagaatccccacagctgccttctccgacatcatccctaaaactgatgctgtagtggctggagtcccagttcacagcatcaagttctcaagtgatctaacacttgactggggacctgagttgcagactttgcttgaagttgatgcttttccaccaagatgcctgcatattgcctcactgcttccttgaacctactcaggatgcttcctaatgtcctcgatgacctcatagcagggcttttccctttgtgcaattttaggttttacagtattaaattatttactagtttgtaattttagagtttgaattcgtcttctctcttctgtgatgagtgtttgtggtgcaaaccacacagctgcagttgtgtagtgcacacatgcctagctgccctgttgagatttactgaaagaacacccatgccactgaattacatttgaggctttctcagatatcagttgtatctatgtgtgctgatctgttcccaagtcctgacatgtgtctcagtaattcctctgcctgtgtgtccatatcgcactgggttgatcacaactttaagcgagtctagtccctgggtgcctttagtgcacaactgttttcttgtctgtgattttgaagcttattctgggtcctttgcctacgactcttacattcagaggtttggttcatgcaaatgacacccatgggggttcttgctgcattttagttaaatgtagacagaaggaggaagaatcagtcaatagttcatgttttctccctcaatggcacagtctacattcaactttctccaagcttatgagatgtgggcatgccattgctttattgctcttaggattgcagccttacatatttctgtttgtaagtgtttcaaaattttgcaactattcaatttttaaaatttttccagaccttagttactagtgcatagaaatcctgatttgctgtcctgacctcatgttctataactctgtcacatatgcttattagatatgatgattgttttctatagtgagatttctgcagttcctctgtgagtggaggtgggtttcatgaccaacactgttgctgttagtcattcctgattgtacccacaagggcctccagggctgctgaggagtgacaaggccacagagccccacccagcctccatcaatgagaaagagagtttcctgtagacaattattcagtcttgcaatccacattcaaattatgatgttcatcagattgctggtgtgctgagggtgaaatctggcccctttttattctatagatctcatttaacgccctcccccaagagagacagagacagagagagacagagacagagacggagatggagacagacagagacagagacagagatggagagagacccacttttttgccctcctttgattattttatgtgattcaagtttatgttcttgtgttgtccacagaacttaattcagtatgtatgtttcaacaaccatagggcatgactaatttattccagtagcttccaacactattctattcctttgcatgcaattttaacaatgttttaatttttccaaactatactatctgtttgtctgtctctctgtctgtctgtctgtcgatatacctacctgcttaccatcatcatctccctctgtatctaagttggcctcaacctcgttactctcctgcctcaggaatcctagttgttccttactgttgctgcctacagtgtttccagtctcctggtttgtgagttctaggcactgctcttcttctagatgccgtggggttagtcactcatatcctttcctgtggattctatccacgctggcatgatgcttccctaatcatttgcactggattctagacatgggatattttgtctaagtactagatgattttttgtaactttaaataataatcaatactttgggggaaccttaagttatttagaaatctttgatcttgttggggctggcagttgtttctcatttggtaggaataaaacatcattggattgaaacttagtgtcccctccactgaagacaaatatagccatcctatctgaacaatgggaagaggagcttgtttctattgtgtgtactatgatgcttatcacccaggggcccctgtccctggcatgggtgcctcctaggcaccacactcatcatcacacaaatgtaggggctgactttgtaaactcttacctcatagagcattttatctctaccattatgtgtcatgtactctgtgtattttgatagtaaagccttgcatactgaaccctcctcccatgttgtgactgaaaagtttctcaacgtagtaaattaaacaatgctagggcttacatagtctattttctggtgtgtgtgtgtgtgtgtgtgtgtgtgtgtgtgtgtgtgtgagactggaggccagcagtgggcatcagatccctggagctgcagtttctggtgattgtgattgggccaacatggatgctgggaactgaactcaggtccagtgcaggaacggtattcactctgaagtgtagaaccatacctgagtccttcctcctgagttctggaggtcattgattgccatctctgtagagacatactgtagcagatgcagagatgatgactgtcactccacagcaggctccttcagggctgtgttcctcactgtctatccagtaagtaagggcagaagatgagttgtcatggtgggaatattgaatgatttggtaaagaatagtctgttctaagcatgtaatatcaaccctatataaggtatatctatcatggaaaagcaatattatatgtctgttaatagtcttaataaactatgttttgaatcagaagcataatgtatgcaaatgaatatttttagtagactcactgtagatggcccaagaatctaatcaagatatgctttaacttttaaagtatctgcccctatttactttctcatccccaatatctgtagccagatttccccatcagcctgacatctccccccttccccttagtctcattggggacagagaacacagtatttgcttcaactctcatgttctgacgatcagtggtgcttgcatcattgctatagcttgtgtttcttttctctattttttttcagtgtgctagatacgacaacgtcttcattgcagaagtcctcattgacaggggcgtcaatgtcaaccatcaggatgaggacttttggaccccaatgcacattgcctgtgcctgtgacaaccctgacattgtcctgttgctcatattagtaagtacattaatccagttgaccagcacttgaagagtcaatgacagacaagtatttaataatttctctcaatgtatcacactactttgggggaaagcatgtgtctgcatcactattcatgcctcaagaatacagatacttagaaactaaagttgttaatcccgagtttactaaaataattcatgtctgtgtcatgacaagctttggagttgcatgtgttttggtacacatcagtgttaatagaatggccatgtttgtgctcaagaatgcatatgcaagcagctatagttgaacttttaaaaaacatgtcttccaaggggatcatacatttgggaaggaacagataagatgcagcagcagttagaaggtaaaatggaaatgatgcagacacagtacttgtgtatgaaatactcaaagttgactaataacagcaaccacctctcttcctgtgcttgaatatacaccactaggtaggactttctaagctcaggcatggttctaaaacttggatccattgacagccaacatcccacccctctagtatagaatgccaaacttctaaaggagatgcagggcaaaaggctagcttccttatgcgatttccatgaatggcaggtccagaccactgtgtagctatgacattgcagaattgatgctgcagaccttgggaacaatgacaacccggagcttatacatgaccacgtcatgatctcaaaagactccttatgtggacctttgtgcaggtccccctacttttttgacaagagagactgtgatcatgagaagtattccttcagaacaccactaaggactggaaacagcatacttcaaggcgaccacaaaacagaacgttgcatattcaaaatccgagactagagtaaacctggacatgaaaactgatgcctgaggtttcatagtcaggatgagctacatggtggcaaattctttaggtctctctgaggctccatgaatgaggaaatcaatgtgaggtttgtgtactctgaagttaaactgcctcttccaaggaaaatcgataactagtgacatccatcccagtctcagaataaatgtctagaagagagactctctaaagaagcagagtcttcttaactcagggtggatgcctcatgcccttgccagactcagtgctggattctgtgtggagagttctccttagcagtcatctgccttcaattcatcctccacctttgaactcagcccttgtttatccctgaaattatcaacatggcgcctccattcttcaagaccacatctcactctaagtgtggacttgtttaaatcatgtttcgtttctccatactctcaggagaaacaataaataaatttagctttccactttataaaggtaaagaaagatgagcaattttaagcctaaatcaagtagaggagagtcgactgaatccaagcaaggggtacaggtttgcaatactgagtttctgtcgactgaatccaagcaaggggtacaggtttgcaatactgagtttctgtcgactgaatccaagcaaggggtacaggtttgcaatactgagtttctgtcgactgaatccaagcaaggtgtataggtttgcaatactgagtttctggtattaggagggaggcaagcttttcaaaggatacagaggagaatgaaagagacccttcccaatggcccaggctgggacaatttggggaataatcaaaggtagtcaaaatagattataatgtaaaacaggcaataataaatactgtgctttgctaaaaatattaaaagtgagtgtttgccactttgtttggcagcatgaacctggaaaagcggcctaaaaacaaagtagactaaagtctcatgcaataccaactttattcagggcatcatttatactctgaggattaagaagaattgcatgagtaagtgtccattcacaaacacaagccacatgtggcaaaaacgtgtttttcataggggcacatgacccacaacagctcaacaaactcactcctatccagtacacctgggaagcgctagaaagcacgttccaagaacaactgcatgcttttgaagaagctgactccacaagacacctagcttgttttcttggattttcacataggcactcagaattccccttgcttgactccattctcggattgtgttccaatgagagagaacacacagatgtaatgtgtagatgagctgtgaaagattcatgtgagtagtctactctcaagaagctggagcacaccgtttccctcagacactgtggtgttcccagtggattccttctgaactgacagtgtgggaaggaaggaaggatggccagtcaccacagacccgacctgagctccctcagataggccctactcagcagtgatgagatgtgtctgcttcaggtggctttggtgtgatagaatggcattctatatccctggtggtctaccaagacatgcaagcccagaaagacatgagatgttttcatgtgattcccattcaagggccattgtacataatgcatagtagtgtgcctctcttctccaaggttgtaaaaatcagtggggatctgagaaactctcacagttcaaaggaagccacgaggataaagataaggcaactgcagtgtaggctctgtgacagctcttggggtagactaaaggcaggctgcaacctggacagggtcattgtaacttaaaaatattataatccattttctgttgtattcttttttaaaataaatacttcctttgagaagaagctttcctgtcatctcctaaactgcatcattagacaaattcatataagagttgtaatcaatttcatggtgcagttacgaagacaggatacactctgtagtaactgtgtaaatgtaaatgttactgccattcttaacagtagaaatggccagagggaaacagctaagccacactgttcttgaattttagagagcttacacaattaatgctgttgtgaggttggaggtactcattttactttcaaagaatgtgtgaccttaagttgtggaggaaaatttcattgtatgtcagaaacattacgtgtatgannnnnnnnnnnnnnnnnnnnaggaaggagggaggggaaagaatgtagtcttgtacagttcaaatgagtttggaccaaaggcagtaaacagatggaccaagctcccatcacagcagtcctgtgcagtcagtggctgccaaggaagcaacatggactggagttcacaactggcatagatttataagagatcctggataattgtgtttatttaggattgtaagaaacttcaagacccttcagtgaaaatgtgttaggaccttgctcagggattctctctgttaaggctgagactatactctggctgcatcttcagctctgctcatggcctgtgctctgtcattgcaatgcccaagagttaaagcctgttttctcttgtatacttccagggttctgttagaattctgtaaagactctcttatgccatgtgacacgtgtgagcatttgggtccctgtgctcctcagctgacttggtttccatgtcctgtgctatggttactccacatttccacattcgatttctgatattctttctttaaaaatccataatttatcttttaaattaaaatataattatcattttccccttcctttactccctccaacccctcccgggtacctttcgtcatatccttccaaattcatgttctctttttctttaactaaaagttatttttacttctattacacatgcataaatacagagatacaatcagatgggtctttttagtttccttgtattaaataatttcagggctgaccatgcaacatcaggtaccatcagagggctcttccttttctcccctctccacattccttagttaattccattctttgtctggggtggggccccatgagatctcttccatccttggtagcaagtctactgatgctacttttgttcaagtcttgtttgggcagccatatttttgaggtgtccttggtgaagtcatttcttgaggatacaatctcgtgatagacttcctggtcctctgccttgtaagacaacggccactccctcttcaacaacattccatgggcatttggtacagagtctgagttgtaaacatctattgggactggcatccaggagcattgttcgctgcaattttgacccgttgtttttctgcaatggcctccatctgggaatctctaatataattttttttgcagatttatttatttatttaatatgtactatacactgtacttatcttcaaacacaccagaagagggcattggatcccattacagatggatgtgagccaccatgtggtcactgggaattgaactcaggacctcgagcagtcagtgctcttaatctctaagccatctctccagcccctttaatattcttttttaaaattttattttaattaatttattcttttatactccatattttatccccccccccatccacctcatgactgttccacatctcaaacctctttcccaccctcttttctccaggtggatgtctccaccccccaacccgcctgaccactaaactccctggggcctccagtctcttgagggttaggtgcatcatctctgaatgaacacagacccaggaatcctctacttattgtatgtgtgttgggggcctcatatcagctggtgtattctgcttggttggtggtccagtgtttgatagatatcggtggtccagattaattgaaactgctggtccacctacaggagtgcccttctcctcagcttctttcagccttccctaattcaacaacagggatcagctgcttctgtccattggttgggtgcaaatatctgcatctgagtctttcagctgcttgttgggtcttttggaaggcggtcacgctctgtccctttttgtgagtgctccatagcctcagtaatagtgtcaggccttgggacctccccttgagctgaatcccactttgggcctgttgcttgaccttctctttttcatactcttctccattttcatccctgtaattctttcagacaggaacaattatgggtcagagttgtgactgtgggatggcaaccccatccctcacttgatgccctgtcttcctgctagaggagggctctataagttccctctccctactgtctggcctttcatctaaggtccctccctttgagtcctgagtctctcacctccaagatctctggtgcattttggagggtcccaccaatctcctatttcctgaggttgcctgtttccattctttctgctgggcctcagggcttcagcccttttcactcacctaataccagatcaggttcccctctcctccccaccccacccccgtccacttttgcttccagctccttccttccctccccacttgtgattgctttcttctctctcccaagtgggactgagatgtcctcacttgggcacttcagcttgttgacctttaggagttctgtggactgtatcttgggtattagtgagtacataccatgcatgtccttttgggtctgagttacctcactcaggatgatattttctaggtccatccatttatctgcaaaactcaggatgtcctcgttcttaatagctgagtagtattccattgtgtaaatgaaccacattttctgtatccattcttctgtcatgggacatctaggttgtttccagcttctggctatcataaataaggccgctatgaacatagtgggacacatacccctgtggcatgctggggtatcttttgggtatattcccaagagtgatatagctgggtcttcaggaagatctagatccaattttctgaggaaccgccagattgatttccagagtagttgtaccagtttgcaattccaccagcaatggaggagtgttcctctttccccacatcctctccaacatgtgctgtcacctgaggttttgatcttagccattctgactggtgtaaggtggaagctcaaggtcgttttgatttgcatttctctgatcactaaggactttgaacatttctttaggtgcttctcagccattcgagattcctcagttgtgaattctcggtttagttctataccccattttttgattggggtatttggggttttggtgattaacttcttgagttcttcttcttcttcttcttcttcttcttcttcttcttcttcttcttcttcttcttttttttactttttatttcttgaaatttttattagatattttctttacttatatttcaaatgttatcccctatcctagtttcctctccaaaaatcccctatctcctcccccacctctccctgctccccaacccacccactctcattcctgatcctggcattcccctatactgggacctagaaccttcacaggaccaatggcgtctcctctcattgatgaccaactaggccatcctctgctacatatatagctagagccacaagtctaccatgtgttttctttgattggtagtaagttccaagaagctctgggggtactggttagttcatattggtgttccttctatggggcttcagtccccttcagctccctgggtatttctctggctccttcattggggatcttgagttctttatatattttggatattagccctctatcggatgtggggttagtaaagattttttttttcccaatctgtaggttgccgatttgtctttttgactatgtcctttgccttacagaagctttccagttttaggaggtggcatttatcaattcttaagcttagagcatgacccattggagttctgtttaggaaatttccccctgtgccaatgagttcaaggctctttcccactttctcttctattagattgagtgtatctggttttatgttgaggtacttgatccactttacgtttgtgcaaggtgacaaatacagatctattttctttttttttttctacatatagacagccagttaaactagcaccatttattgaagatgctttcttttatccactgtatatttttggcttctttgtcaaagatcgattgtccataattgtgtggttttatttctgggtcttcaattctatcccattgatcatcgtgtctgtctctggaccaatgccatgcactttttatcaccattgctctgtagtagagcttgaggtcagggatgctgattcccccagctgttcttttattgttaagacttgttttcactattctggggttttgcctttccagatgaatttgagaattgctctttccatgtctttgaagaattgtgttgggattttgatggggattgcattgaatctatagattgcctttggtaggatggcaacaattcagaagcattcaggagaaaagagggaaagctgccccagttggtacctgacacttttagctaattcttaaagtgtcatttgtgccaacaaagtacaactgtatgtgtaagatatgtatatgatatatatgatataatatatatatatatatatatatatatatatatatataatatgtacaaacatatgtgtgtgtatgtgtgtttataatatatattaggaaaaagctaattcctttttttctttttgatttattagatattttctttatttacatttcaaatgttctttatttacatttcctggtttccccttcaaaaatcccctattccccccaccccatgtgcaccaacctacccactccctcttcctggtcctggcatccccctacatttggacatagaaccttcacaggacaaaaggcatctcctcccattgatgaccaacagagccatcctctgctacatatgcagctggagccatgggtccttctatgtgaatttttggttggtggtttagttcctgggactcaggaggtactgattggttcatattgttgttcctcctatggggctgcaaaccccttcagctccgtgggtcctttctctagttcctgcattggggaccctgtgctcagtccaaaggttggctgagagcatccacctctgtatttgttaggcactagtagagcctctcagaagaagctttatcaggcttctgtcagcaagcactggttggcatccacagcagtgtctgggtttgatgacatgtgagatggattcccaggtggggcagtctctggatggcctttccttcagtctctgctccacactttgtatctgtaactcctcctataggtattttgttcccccttccaagaaggaccaaagtatccacactttggtcttcctttttgtgcttcatatggtctgtgaattgtatcttggatattccgaacatctgggctaatatccacttatcagtgagtgcataccatgtgtgttcttttgcaattgggttacctcactcaggatgatattttctagttccatccatttgcctaagaatttcataaattcgttgtttttaatagctgactagtactccgttatgtaaatgtaccatattttctgtatccatgcctctgtttagggacatctgggttctttccagcttctggctattataaatacaactgctatgaacatagtggagcatgtggccttattacatgttggaacgtcttctgggtatatactcaagagtggtaccattgcatacactagcaagattttatcgaaaggacccagatgtagctgtctcttgtgagactatgccagggcctagcaaacacagaagtagatgctcacagtcagctaatggatggatcacagggctcccaatggaggagctagagaaagtacctaaggagctaaagggatctgcaaccctataggtggaacaacattatgaactaaccagtaccccggagctcttgactctagttgcatatgtatcaaaagatggcctagtcggccatcactggaaagagaggcccattggacacgcaaactttatatgccccagtacaggggaacgccagggccaaaaagggggagtgggtnnnnnnnnnnnnnnnnnnnnnnnnnnnnnnnnnnnnnnnnnnnnnnnnnnnnnnnnnnnnnnnnnnnnnnnnnnnnnnnnnnnnnnnnnnnnnnnnnnnnnnnnnnnnnnnnnnnnnnnnnnnnnnnnnnnnnnnnnnnnnnnnnnnnnnnnnnnnnnnnnnnnnnnnnnnnnnnnnnnnnnnnnnnnnnnnnnnnnnnnnnnnnnnnnnnnnnnnnnnnnnnnnnnnnnnnnnnnnnnnnnnnnnnnnnnnnnnnnnnnnnnnnnnnnnnnnnnnnnnnnnnnnnnnnnnnnnnnnnnnnnnnnnnnnnnnnnnnnnnnnnnnnnnnnnnnnnnnnnnnnnnnnnnnnntagtcttacctgtgctcacagaagaggcagcactcctgggagaccagctctctcctggctggcgatatttgtgtgtgtagctctatggcataggatcagctcttggtgcagatggagactagaaggatcctgtcctcagttgaaccttggttcctgtgtcctgagggctctgggtgggttcctctgagcagcagtggtggtcttaccaggactcacaggactgtctgcactcctggaagccttgctccatccaggtgctatttgggtatgaaaagctaattcttaaagtgtcattttttccaacaaaataccactgtatttgaaatatatatgtatgcacatatattacacacacacatatatatatacacaaacatatttaatttctaaagttctttttattaggcacttttgttttctaattgtaagaactatttacttcagaagcattgcatgcaaacaaaagaatgaaagaaagataagacaaagagacaaactgacaaaagcaaaacaaaacaaaacaaaacaaaaaaacaaaaaaaaacccactaccagttttctttccatgtgtatgtattatgtatatgcatgtatgtatgtgtgcataatgcatgtatgtgttggaagtacatgtatgtcacagtgtaagtatgtatatgaatatgcatgtgcattcatgtgcctgtacacatgtatatgtaggtgtgtgtgagtacccacatgcttgtatagaacacaccctaatatttggattcttactatgctctcattgcaccgtttccatgtaagtctgtgcatggttatatgtgcacatgtgtatatgtgtgtgtatgtagagcacacactcgatgcttagacctatacaggttcacattgtttatttcttacagagtttcctgagtattttccacattttaaaacatcccaagcacaaattcagttttacatggtttccatatttaggttctataatattttaggaatatttttttggcaccttggtttccacttcctcgtactcacagatgattatcacttcataatttaataggtcctcgtttccagtaaaatatagcatctttccaccagaagggacatagaaagagtgcagcaggcatctgaagcaggcattgacaaacctctgtgtatactgtagccattcaagtctgatacctttaggcctttagttaaagcatcccccatacctcctactctaagatgtaactggtctatacaatctgaggtgttcctaggactgcaatcttgggaagggttgagaaaatgacacatctagaatcgtgactgagaaaggctgtgacacttgaacccagtgtgaagtagataaacctgaaaatcctcatttaaagggacatgccatgccatgtgcctgcactctcggcagaatgcaccttctgtgttggtaacactgtggtggatacagaaacatgaaggaatgtaaacagaagagagagcctctgtgggtgacttgaagtagaatgtacgtggttgcaggaagatatgtaactgtgacatcttaagcagagaatctcatttccaagaaggcagggctcacatgctagaggaatacaccaagcacatcaggggctctgagagtcagaggagagagggttggttagaaggcagagcattgtatttgaatagtgttataggttggagaataaacaccatgaatatcaacagacccatatcttcgagttcagcaatagcgtggttggtggaaggctacagtactgtattagtcagggttctctagagtcacagaacttatggacagtctctagatagtaaaggaatttattgatgacttacagtcggcagcccaattcccaacaattgttcagtcgcagctgtgaatggaagtccaaggatctagcagttactcagtctcacacagcaagcaggcgaaggagcaagagcaagactcccttcttccaatgtccttatattgtctccagcagaaggtgtagcccagattaaaggtgtagtccaccacacctttaatcctggatgaaaggtgtagcccagattaaaggtgtgttccttaaactcggagattcaatcttctggaatccatagccactatggctcaagatctccataccaagatccagataaggatctccaaaccaagatccagataagggtcactggtgagccttccaattctggattgtagttcattccaaatatagtcaagttgacaaccaggaatagccactacaagcacttaagaatcctgagttttaaacacatcctgagttagtggagtggctgctatagaagctcagaaaaacccaattaacacctagaccagcagggagctaagtgatgggaggggtctgaactgtggtacgcagtattcaagaggaccggtacaaggctttgtctagacccttgggggttgaaagcatgttatgcagagatattataaatgttcagttgtggtcaggcaaatgagacctgaagaaggttctaggtgcagggcaggtggcaagagggtgggcagttgacagcatgtatagaaatccatgcttggaacacagcctggaaacctacaaggagttcaagcaagggttatcagggtacatagctaggtagcagtgtggaagagatttgcctggagatagagaaaggggatggtgggacccagtataagctgctacattacaaggatacaggaatggaaaggcagcttggatgatatgatgcttgctgtttgtgaggatcagagcccaagcctagcacccacatgaaaagccagatgcagcagaatggtcttgcaatccacagctgggaagacagaagggcttgctgacccagcctagtctccttgccaggctctaggaaaagatgagagaccctatcccacaaaaaaagcaacaagtagaaaaacagataatgactgaacaatgatagtctgaggtagttgtctgacctccaaacaaattactcgtgtacacacacacacacacacacacttgtgcacatgcatgtataaccataggtatatccagaaagacacacctatgcatacacacataccatgcccaagtaattacccaagtaaatcaaggatttttatgccatgttctgaaagagtctgtttccctaaaaaatcatattaaaatcctatcactcaaaataatggggtacagagatgaggaatttagggtaatggttaggtcaagaggatagtatccctaagattaagattacaaataatgcagtttccatctgtgccctgagctgatcctgtgccacagctcttcataggcaaatacggtcagaagagagctggtctcccaggagtgccgactcatctgtgagcacaggtaagaccaccacttctgctcaaattcctggcccatcctgagccatgtcctgagccatgtcctgagccatcaggacacaggaaccaagaaacagcctgggacaggatccttccggttatgatctgcaccctagagctgactctgtgccacagctgtccatacctaaattcctcacagagagaactctcaggagttgtgacatacaggatttcaggagagacaagccacagtaagagacagcaagaccagctaacaccagagataaccagatgacaagagacaaggataagaacataagcaacagaaaccaaggctacttgacatcatcagttctctcaccacagtgagccctggaaatgccaacacaccagaaaagcaagactctgactgaaaaatcacatctcatgatgatgatagaggactttaagaaggacacgaataactcccttaaagaaatacagaagagcacaggtaaacagcttgaagaccttaaagaggaaacacaaaaatccctaaaagaattgcaggaaaatatgaccaaacaggtgaaaaaattgaacaaaaccatccagaatctaaaacaggaaatagaaacaataaagaaatcacaaagagagacaactctggagatcaaaagcctagaaaagagaccaggagtcatagatcatcaacagaatacaagagatggaagagagaatctcaggtgcagaagataccatagaaaacatcgatacttgacaacggtcaaataaaatgtaaaattcaaaaagctcctaactaaaaacatccaggaaattcaggacacagtgagaagaccaaacctaaggataataggtataaaagagaatgaaaattcccaacttaaagggccagtaaatatcttcaacagaattatagaagaaaatgtcccttacctaaagaaagagatgcccatgaacacacaggtagcctacagaactccaaatagattggaccagaaaagaaactcctcctgtcacataatagtcaaaacaccaaatgtacaaaacaaagaaataatattaaaaacaataagagaaaaaggtcaagtaacatataaaggcagacctatcagaattacaccagaattctcaccagagactatgaaagctagaagaacctgggaagatgtcatgcagacacaaatgccagcccaggctactatacccagcaaaactctcaattaccatagacagagaaaccaagatattccacaacaaaccaaattcacacaatatctttacacagatccagccctacaaaggataacagattttaaaaaatcaacacaaggagaaaacttcaccctagaaaaagcaagaaagtaatctttctacaaacccagaaaaaaatagctacacaaacataaaaatagcattaaaaataaaaggaagcaataattactattccttaaaacctcaacatcaaaggactcaattcctcaattaaaagacatagaataacagactggatatgtaaacaagggacaacgttttgctgcatagaggaaatgcacctcagtatcaaagacagacactacctcagagtaaagggatggaaaacaattttctaagcaaatggtcctaagaaacaagctggagtagccattctaaaattgaataaaagcaactttcaaccaaaagttatcaaaaattataaggaaggacacttcatactcatcaaaggtaaaatctaccaagataaattctgagcatctatgctccaaatgcattggcacccacattcataaaagaaactttactaaatctcaaaagcacacattgcacctcacacaatagtagtgggagacttcaatgtcctaccctctgaaatggacagatcatgaaaacacaaactaaacagagacacattaaaactaacagaagtgatggaccaaatggatttaacagttatcaatagaacatttcatcctaaaacaaaagaatataccttctttgtagcacctcatggttccttctccaaaactgacaatataattggtcacaaaacagacctcaacagatacaagaagattgaaataaccccatgcattctatcagatcaccacagactaaggctgatcttcaatagcaacaaaaacaacagaaactccacatacacatgaaagctgaacaatgctctactcaatgataacttggtcaaggaagaaataaagaaattaaagactttttagaatttaatgaaaatgaaggtagaacaaacacaaacttatggggtacaatgacagcagtggtaagaggtaaactcaactcttagtgcctccaaaaggaaactagagagagcatccactaccagcttaacagcacacctgaaagctctagaacaaaaagaaacaaatacacccaagaacagtagatggcaagaaataatcaaacttggagctgaaatcaaccaagtggaaagaagaacaacaaaaccaggagttggttctttcagaaaatcaacaagatagataaacccttagtcagactaaccagaaggcacagagacagtatccaaactaacaaaatcagagcagggagatgtaacagtaactgaggaaatttttttaaaaaaatcatcagatcctactacaaaagcctatattcaacaaaactggaaaatctggatgaaatggacaatcttctagacaaacaccaaataccaaagttaaatcaggatgagataaaccatctaaacagtcccataacccctaacgaaattgaagcagtcaattaagtttctcaaccaaaaacagcccaggaccagatgggtttagtgcagaattctatcagatcttcaaagaagacctaataccaatactcttcaaactattccacaaaatagaaacagaaggaacactagccaattcattctatgaagccacagttccgctgagtattctcccttggagatggaacagtttctgtctaatcaggaactttacacaatttcctttcatagaggacttcataagagttttttcctatttctatcatgtttaatgttccaaatgaatttgaaaaactggttgagtgcatatacttttagcttcagaagacatcatgtatatttaagaggcatttaactattataaattattttgatgacttaaaaaaattacaaataggttcctgggagctagtcagcctcttccaactcataagaacacatctgtaagcctcaccagatgtggtcgctgtctgtgccttggtcttggaacagtctccagacagtgagattcagctgctccccatctcctgtgttacagccctgattcatacatggggggcagagtctgtcaccagtgcaagcaattctcagccttgcattgcctctgagtccgtgatgagaggccagccaatgtttgttctttgtgagggctccatggaaagggtgctcagtagagcatgcctcataaccaatggctttcctggaagcagatggagaagtgactctctgacttctgtcctcagaggagcagatgaggaccccactcactccaagacactaagggtgttgttcttcactccgtacaaactcatccaggactcctgagtacgatgcctactaataactcaagctgcatggagtcaggcatcctttacactgaagaccacaatctttctgtgtgaaagcattttcagagaacacgttacagtatcagaccattgttacaatgtatccattgtgtggagagcagagatgtgagacccagaacactgcctattcctcaacttagcgtgatatactctctttattcaggagtttgacatccttattcccttttcaatattatatattacaactgccacatttgggtgctttaatattaataggaatatggtgcagggtaatttatatgttagctgttttatcatgttccatggaggcatgataaaacctgctccttttaaaattatttaatttagaaagcctgagccaggctttgccaagtgaaatccctgtggcagatttcacagactatctcctctgaatcaatgtagtaatatcaaaaccttcagaatatttctgctgtctgggctgaacaagcacgtctcagaattctgtgtgaaagtagtatagtgccactggcctttttgtggatgtgggggaatttctactccaaagaatacattcacagactcacatgcagacacacacagagacaaacatacacacatatagacacacacacatgcaaatacagacaaacacataaagacacacagagagacaaattctgttgtatggtctgccttctcatatcttggatgtcttgtcttgatcacacgtctgtctgttatgttagttaaatccgtggccagtcataacacaactcaggaagaaagcaatggctactgcattcagaagctgacatggaaatttaggaaacatctcacaaaagaatcagggatggcagcaattgagcaatgcaaagacagctccactcttagagaccatatgcaaaagcagaatagtgtagtgtgtagcagatgcatctttgtagtcttttgtgttacaattgacgactttcataaagtctctgaaaggttaaatgccatgagtcaggtggagatatacacattgaggaaatacatatttttagcatcataaagccaattaaaaattgaatggtatcaaataaaatatcattaagcactttctgtcagccaagaagaagcagatatatagtcagtctataacttgaatttataccaggaccagaagtgaggaactgctggataataccattagtgtgactatccagatgatggcagaagtgaagatcgacttccaaggcaacataagacaaagtcaaagtggtgtcagagtgtgtggtgcagttgtcctcacacagagctacctatgggcactaggtgcagcctgacttgctggctcatccccagcctgtttttcagaatcagccagcatagtcctgtagctacctcttcaattctgcagcattcctatgggctgctttatccaatgagactctgccacctgtatgtattaactaaaccagttaacacaagcggtgtcacagaggaggatgtcagggcatctccaggctaagactgtcccactaacaccttttccatacctggagctcattgccaacacagacctgctcagagcatgtggacaaggtggcttctctcttactctagtggctcccagcatgcagatacatcccagggttacatcactgatagagtaaacaaggctatcatgtagacctggcagggaggccttaaacctcccaacacacacaaatgtagctcaaagctgatgcagcaagggtgctgtgagcgtatcaagggcactagatcgatagagtattttctctgataatctgttcagagaggttaatagagggaaaaataagttatgctcagataactggagagcttcattcagggaagaggtacagagtcagcaggactgaaagtctccatagctccacggacacagtagggccatccccgagagcaggatggtctcctttctaggtgagagcatgcataacagtaggtccatcattccaggtgatcacaccaggacggtgtcaggtgggagacggtgaggacaggttacctctgggctcacatttgtctgcagcacactagtgacccccgtttctgtaactgctgccttcctcgtactaacacccaatgcccagggctgtcatttcataatgtaactaaactgtgtggtaaagcataagtgtctttaatttcaccatgtattgttaaaacatctttgcatcctcaaaatcctgagaacagcagctgggtgagccccaaatgagctccatgtgtacaggtgaattcagaatttgaaactaggcagtaagcgttatttaagttgttccagagaaagctgtgattccttgggccagctagggtaacttaacaaaccctgtcacatattaagatttaaataaaggtggttgatgtgtagttggtaaagcatttacctaatggggaaaggccatgggttcagtccctaacactcaaaataaaaaaataaaaaaatagaaaaggtataacattctttattaaaactgccacaaattggacactgagtcacttcggagtctgacagacactgggaaataaggtttctgcacctaccatgggtcatcctgtggggtgcactgattcattaattggtatttagttccccaaaatgtctctgcaaatgatttgcatgctgtccaatatcagagcttttgactgtgatggactaaatgttgggacctctgaagttgaaacacagatcctgtttccgggctaggcagagagctctgggccacagcatgcaggaagacatctgagacatgacccgccctgtagaccatcacataccacctggagagcatcacggaataaaaagtcggtgttctctgagtgacacccatgggagtgaggtacacagaggtgatgggttttagatatgacatcacagtcttgtctatggcctttaccttcctttcaagaggggcggggtttaagaaagattccatgtttaggatttaagagagatggctcagtgtgtaaagtaacttagcactaagtctaatggcctgagtgtgattcccaagacgctttgtggtggactgaggaaactttataccaccagttgtcttctgacttaaatgcacacacacagacacacagacagagacagacagacagacacacacacacacacagagagagagagagagagagagagagagagagagagagagagagagagagactgtggcatgcatgtgcaccactaaaagaaatgtttaattatatatattatatcacaaatatgtatgtgtatgtatatgtatagacacagcagataatctgtatgtgaagggcaatgcatttctaggacatgttaacactggggttcctggagactctgcccccagagaaccacagagcagctgtcaatgaaactcagaagcagagaaagtcatattagcatgtgaaggcaacagaagccagcaggaaatcagatcaatccaggaaatgtggaccctaaaaatggaaagagcatttgaaaagtaagccaattataaactatctttggggaagcagtaggctgcaaagacagagaaaagcagccaggtttatacggggaaaaccagggcttgtgctgtcgtgaagacaggggagggagagtgccttgaaagtcttatggcccacttggaggctgtatttctggaagtcattagttttcatggagaaaaatgcaaaccacacccatccctcctacaagggtaaagaccagactaaacttgtggggtttttacttatgtatgtaaacatgattgagtaggagattaaaacaggaataagatacttttaaaatctctttgagcatttagttactatgcgtgcatgtgtgtatgcacatgagtgtgtgatagcttgcatttggagatcagacgacaatttgcagtgataggttttcttcttccaccgtgtggggtccaaggatgtgactcaggttgaagacttggcagcaagtgccccaaccctgagcattactttcaaccaaaggaagacgtgaaccataggtaggtgctggcaccttaagacactaggaagaaatcatatattcaggtcattagtgcagcacactgagagacagaaaatgtcaacttcccaacccttcagtttgtttataaatcttgaaaaggctatattttctcagggcaggtataggctcttcggatcagccaaacatgcatttaacaaaggctgctttcggactataattaaatgaatgattaatgagttaggggtcctggctgattttgtgtaaggctttgttcaataaacattgaccatgcacctatgtgggctgcacacaaagcttcccccagagggcatgcctggcttattagggtgggcagcttaagtgacatgagattgagctgtatttcctgtacggcacggctccctactgtcctccctcatgaccctttccttgaccttttctcagaaacaccgtcttaataggctttcttgtaaaactacttattttaattggacagccgacctttaattatattctggctattaattgattcaaatgtcactccagctagctccccagataactgttaatgtgtctaaatttcctctcacctttgcatttagcagacacaagacttgctaggggcatgccagaagggctctgggcattcacctcaaaggtggttttgttccttatctattttcaaaggacatggtccattgaaattgaatgtatttgctggagaaagatggagatgtccacccaaacgcaagggataaagttttaaacgatgaatagttgtgttacagggacatgaccatcaagtactatgatatactttgtatgccagtggctccacccccaggatatgtcgagaaatcatcaaatctccatacttggtgtatatcttcagagatgtaggtgtcttgtccacttcatgattaggtagaagttttgtttttgattattgtttgtttgtttgtttgtttgttgaaatagatttatttctttacgctctcaatctgagtgtcccttcctcctctcctcccagtcccttgctcacacctccctctccccctggactcactcctcctcccctcagagaagaacaggcctcctaaggatatccatcaaataccaccatataacaagttacagtaaagccagccacacaccctcatagcaaggatggatgaggcaacccagtagggggaaagggtcccaaaagcaggcaaaggagttacagaaagccccagcctcactgctaagattcccataagaataccaagctatacaaccataacatatgtgcaaatgacctagctcagacttccacaggctctgtggttgctgcttcagtctctttgagcccctgtgagccctgcttctttgattctgtgggccctgttctcatagtgtccccaacctggagggaagggtttgaggggagggaaagagggaggaagagagagagggaggaagagagagagggaggaagagagagagggaggaagagagagggagagagggagagggacaaagggacagagggagagggggagagggacagagggacagagaggaggagagagggaggggggaccgggagagggaaagagagggggagagggagaggagggggagnnnnnnnnnnnnnnnnnnnnacagggacatctggaagaatccagagcagagagaatagaagccaactggaccggctcaggctgtctcttgggagcagagagaagagggaaccgcagagaacagtagatatttgcaggataaagagggcaggggagaaagcttgccattgtatggaggtcaacaggcatccgggtgcagggaaacctaggaactatagcagcctggaagctagcataatagagaagaagggtcagggctgtgggtcaaggtgtgggctgaattcggggccaaaggaacctggaggccagcacgggtttttatatgcaagatgcctatgtcagtggagagccatacctcccttctgctagaggcaagtgaaatggctctttttgccagatgggatcttgtttctcaagtccctgaggaatgctgcctgttttcctaacctctagaaacccttctgtagccctggctgtaatttccaggcatatgtacttcctgaagcctaacaggagcctactctgtcaggtttcttaagggtgagagtgtggccagcctcccaccagagggtcctttcccttttcagttccatccacctcacagaactgactccagcctcctctctcatagcccaggactctactctctcaatgagtcctgaaataagacagcctaactcaatggcttcaggtcaggaatgaaggtcaagagtgtcctcacttagacagtctctgtacttccccagccctgaaaattttcttcagtggcttggtttttactgccaggaagttttgtcacataaatatcattacataaggtgtacacattcttttcttactgattgttttattactatgtcctatctcatcatacataattcctgtctgctgtactggttacggttggttcctatcaatatgacagagcagcttccaaaagaaacttaagggaagcaagatttattttgactcatggtttgaagggagagagtccatcattgctgagaaaacacagggcagggcggactccaaggaggacagggtgtggggcaaggactccccatctcctcacaactcactgcaagaggaagcaaagaggagtcaagaagtagggacccctgtgctctctaaagacccccacaccctgtaaggacccctgtgcctactcacttcttccagttaatctccatcttctgcagtttctccaaacagctgggaactaagtattcaagcacaggtctgcagggggcattttaccccctaaatgcccctgcattccacaggttcctttcctttaacttttgttctgacaggacccctcatttttaaaagatagttcacagcccaatggaagcactcagacccttacaaacagctaaggtgctcattagcatatcaaaaaggatgggtgctggcagccactctctcagctctgcttgtatctggcataccctacccccttaccccaaactctccagctctcccctatgaccattttggctacaccactttcacaccctgctctcttgctcacctaacctcttggccttcatgttcttcctcctcctcttccctttcccctctccatggcctgctggctcagcctgttagcaaggtccagtctgggatctcacagctgcctctttctcttacgttccctgtatatctataataaacgttctatgcactttaggagtgaccactccctccttcctttttctttccctttctgttcaggcacatgagtggttctcttctaactttccttctggtttgtaatgtgactcgtcttccagtttttatatctatcatctgctagacacctatgctcacactttgctgtgcttagttttcttctttggtctggaatatcaggtggagacctctgtcctcacagcccgtgggacacaccctccctttgctgctgcagcaaactgtcattctgtgagtatttggagatgtccttgggatgactggctgcacaccacacgccgctcactcagtcctgaagattgttcttctcttgcatgctttgctgtgtgtgtaccatgcaacaagggcacatgtaaatatttatgcctccccaagtagtaaccattggcctaaggaggtttcacagggggagctgtaaaacttgttccaatataactcaactgttataaaatttttaaatggccataataagggctcttaattttactgccataaaaatttgtaagtgttaaattctcaaagcacattttaatcataataaaagttcagtacacggctccttaatgaataagagggccacccaactctattacaagctgtactatctgccaaaaatctagagtccaaagaaaaattacatgcttctaatgttccctcttcataaataatggcagccatgggcaatgattgctagaaatgaaagatgcgggcacaggctgctttgaggcctgagagattactgtagagtgaatcaagggtcagggtgtggccatccccagctcagagagggtcctacctccccagtccattcatagcagtcaccagacagagcctgttggctttagtattgaatgttctgattgtcagctcctccctctgcctcctccctgggcctgtctaagtaggagatggtcacagaaatggtagacttgggggaggaacctcaggtttccatttaattattcaacagtaatttggggtgggtggtgtgctggagagatggctctgtggtttagagcccctactgctcttgcagatgatgcagattcggttcctagcttccacaggacagctcagtgccatctttaacaccggtcccagggaaactgaagtccttatctgtccagagatattatgtttacaacatagcaaagatctgtcaacagcaaaaaaaaaaaaaaaaaaaaacaaacaaacaaacaaacaaacaaaaaaaaaaacaactatgactgttctcatgaagatgcttggacaggtgtttgtgaaagaagtacaggtggccacattacagttccacacagttaaagccaagcctggccatgcttatcttcaggacacctttagtcctaacactctgtgagttggaggcatggctgatctacacagtgagctccaggctgggcagagttacatgacagacctggtgtcaaaaacaaagagaaggaggaaaaaaaggaggaggaggaggaggaggaagaggaggaaaaggaggaggaaaagaaacagagagagagagagagagagaagaattagtaggcactagagaataataaccccccaccactccagaacactgtggcagagcagtgtgtgcagagccattgtggagggaaatgagctattccaggaagaaggctggaattccagtggctcaggatgactcttgtgggcttcagttgggatagaaagtacagaggagttggggaaagtgggaatgtttgatctctgtgtggctggaatgaaaccagagcggtcatggagtgaaggcatggaatagttcacgaagcaggcacactcaagtctgaatcaaatgccataggcacccaaatgacgctaaagtgcagatacagcattcaatccaggggtggcagcctcttgtctgaagacaaagagtggagtgcaagactatgacttacaaggttggtgaaccgaatacttcagtgtgtgaaaacaagagtcgttggtggctttttcatgggagtgtgatgggatttagttactgtctaatgacactggagggagagtgttcacaattagtgttgggattagaagtgagaccatgaaagtggaggcctgagtcctgtttattttcacacagtatgcatgcccgcacaacttctgggtgagctagaagaaatggaaaacattgaaaccccgctgtctagctctgagtcagggactgtaagcttattttatttttactgtttctggtggtttgtttgatggcttaaaaaatttccataaaaaccattattttcttttaaaaagtatttattgttacctaaatgaggagtctagaagagggcagcagatccctggagctgaaatcgcaggtggttgtcactcgccctgaggggctgctggggaccaatctctgcaactctgtaactgcagcagctattacatcttgactaagacaagagacaagatggctgagacatctcgacaagccctaaaatcaacttttcaaagtgttccattttctaaattttcttcaacgtgcttggtatcataacctggacggttctaggccacgaagacatgaatccttttgaaaattcagtggagtttcatccaggaacctttctcatctttccattgtgactttgatgacgtccgtgctagtgtctggcttgtgctacatctgctcctaaggtactgtgtcaacagtcccatcacccactcagagacatctagattttctcatctgaagagcgtttcaaagtttgcactttacattttggtctgtgatctattatgaatgaaattctgtgaaggaagatgagtctgttataactttatataaaaggagctgagactagtatcccttaggaaaagagctttaatggaagaggtatcatcgagactataggaggctatggtggggccctggagggaaaggaatccttcagttccagagaatgaattgaggtttctgacggtggtattttaagaggggaaagtgccatacaatgtggtctagcctgtgtattaaaagtcacaaggcattgatctcagtaaggtgggaattcaaagttgtcattggtctgtgcagcagggagcaaggcagtcatgcaaggggtaagagaagaaagcccctgacagctgcatcctcaaagatgtgcccttggggaaagacttcaggacagtgaggcccgctatggggaaagagcagaggcaagtctgtggtctggttcttttccacagtgatcaccaacttccccagcactaattgttgacaacactctactgtagcgaatagcgtttatgtctaccatgaggactctgtctgtatctatgtaggtctgtctctgccttctattctcatctactgatttgtgcattttcccctgcaatatcacacgtcccaattatattgcttgacatataactggatgaagtcagcctcccaacattctctccttcaattccttgttggatatttaggtttcctctgactctgtaaaattttgtcatcagcttgttggtgtctgtccaatagttttctaggatgtcaatttggattttattaattctgcaaggcacatttggaacatctgtcatcttggcattcctacccatcatcgccaggggctatttccccaactgtgcattagaagagacttcttgggagtcttccatctcttcttgtctcagaagcagtttgttaggttcatgatctaactaattcttatcccagggttctaatagtgacagtggcatggtttatgttcagccctcatatttgcagaatggagaaatgaagaaaagctgttactttcacacagtcttcccatcctgagacctagacattcatgggggatgggggcaggcttctttttgttttggttttgggactttctctatttaagtttgtttcctttcatactgtgttatttctctttcacaggctgtacacttcttatctccattttctgtctgattccattagctaaggcatcccgtggaatttggggaaagactcatgggagcagacgccatgaagcgtgcctgatgttactgtgaagtttctactgtctgaccatttagtacagtgttagctgtcaaggtgctctctgacaaacagagtcatactttatgctacttactggttttccataaagagatgctgcattgtaccaagtgattcatcaatatctactgatatgagcatctgctcttttagcttttcagcctgttagtatgagataatgcattattgattttcaaatgctgaacctctggccaggttaagacgaagatacgaattattttttaacaatttttaaatttatgtgtggcttagttagggttttcctgctgtgaacagacaccatgaccaatgtaagtcttataaaggacaacatttaattggggctggcttacaggttcagaggttcagtccattattatcaaggtgggaacatggcagcatccaggcaggcatggtgcaggaggagctgagagttctacatcttcatctgaaggatgctagcagaatgctagcttccaggccgctaggatgagggtctcatagcccacagccacagtgacacacctactccaacaggaccacaccttctagtagtgtcactccttggtccaagcatattcaaaccatcacaatgtgcatgcatgtatgcctacataaatttacataaactttgtgtatacatgagccaagacgtgcctaattcattcaagagctgagagagaggcaagaaggtgcccttcttaaaggcagagaaagcagaaccataccaacagttcaaagatgctctacttgttttgattatttttaagccctgtttggtcaatttgctagtattttattgagggtttgtcccctgaattaatgagatttggtagttttaagccttcattcgtctttgacatgtggcaacactggcctgacaggctgtgtagaagtttccatctgcttcagtgttctgaaggaacctgcacagagtggacacattttctccatggaggatgtgtgaaaattcaccatgaatcaagcatatcatcatgattcaggttatagagattgttagtgggtgatagaggttgttagtgggttatagaggttgttagtgggttatagagattgttagtgggttatagagagttgttagtgggttatagagattgttagtaggttatagagattgttagtgggttatagagattgttagtaggttatagagattgttagtgggttatagacattgttagtgggttatagacattgttagtgggttatagagattgttagtaggttatagagattgttagtaggttatagagattgttagtgggttatagagattgttagtgggttatagagattgttagtaggttatagagattgttagtgggttatagagattgttagtgggttatagagatggttagtgggtgatagacattgttagtgggttatagagattgttagtgggttatagacgttgttagtgggttatagagattgttagtgggtgatagagattgttagtgggttatagagattgttagtaggttatagagattgttagtgggttatagagattgttagtgggttatagagattgttagtgggtgatagacattgttagtgggttatagagattgttagtgggtgatagagattgttaataggttagatgcagctgatggcctgcctcttcaagtctggggcagtctgttttttagggaactagtgtgtttcccatcagttataatctgtgggtgcatggctgttcataatgtcccttcttagtcttcatgtctatggatctataatgggaaccctcttatttatgacatcagtttttatcttttaggggctagggggatagctcagcagttcagaacacttacctttctttcagggtatcctgagtggtttccagcacatacctcagtggctcacaaccacctataacttcattcccagggaattgagtctctcctttggactccaagggagcttaaatgcatatgacacacataaatgcatgcaggcactcacacatacatgaaagtatgttttaaaataaatacatttaaaataataataataataatttgtacttttttcttcacctggccagagcttgaccaactctatagacttcaggtctctttcataaagacattaacttcatctcagtcttagaggttctaaagttacaagctaatcacccctaactgtcccagctcttaatattaccactctgtgggctagattacaatataagaattcagaagggggaataaacatttagtccattgtgctgggcacagaacaccatcttagtttcctgaaataatagagtcgacaaattgtggctttcaagaacaagtattgttttctgacacctctagatgtctacagccaagggactcttctttgcctcttcagctcccaagagaacaggcatgccttgttgcttaatggtattggtctaagctctgtttcaccgttccatttctgtgtcccaccaagttcctctttgtctccattcaaatgattctcttattaaagacactgagcatcttggaatagtgtctcacgctgttccaggatcatttcctctgaactagcattgtctgcaaagactatgtacatgaggtacttgggttagagtttcaaaataccattgggggggggggcatgttatctaactcataatggggtaaaacattccagtgccagccttttcattttcagtagatttgtggttatttaaaaatgagacgttaccaaaaaatttaatcatgtagaaagacgtggcactttatcattacagtttcattacatgacttttactaagctttcaatattaatgtgacaaagaaaaattactaagtaaaactgtgtacaaacagagttgttgagattaaattgttacaaagaacaagccaatgaagtgtttattggtctatatgtcatctggcatgaactaaacagaatctcatttagaggaaatgatatatgtgagtcccaactgtgatacatcaagaacaaaatttaggacaaatttggaattaagtggctttccggtttcaataaatagagagtaaatgttcccatggcctctagtaggatctgagcattcagttgcttgaagagtccctgttggtttcacaaatagggaatatgtcaacttcacgtccctgatgataaacagcaatcatgatgtgcttcatttattttcttgaaagaaatgtcaggatttgccttgcagtttatgctgcataaataattttttgttggcctagtggttttgcccaacagtagacttctaagcttgtaggtagaatgccagggctggatgtccatgctgcaaagaaaagatattttggaacttgtgatggtcaaagtctgaaataacctgagcagggagtctcaaggaaggaaggaatgcatctatgggcaaggttgccctgggggtgtctgcatggagatcctttcactgggtttatggaggtggaaagacctctaaacgtcagtagtactatcctaggagctggtccctgtcctgaaccaaagagacagacccgagagcacacacagatttgctggcttcagaccacggatgtgatgtgagcagcaactttaaactcccgaggccctctcttctctaacttgctctaggaggagtattttgtcgtggcaactagaagcaaaagtaaaacaaagtaagagtgtcttagtctggaagattcttctggagtgagagagagtagacaagtgctcacagtataaggcatgcaacatctggtggtcaggtgcaggtaggaggtatgaggccattccacacacagcagcttgcttgcatgcatcaacacgcacatacatgtgaacacacagatataaacactcacacaaatctttatgtctcatgccatgataatattacctcatgtaaactgcttctcctgcatgaagaggaaatgtgtttccctccactctaatttttgactccctttacacacacctggttcctgacctataatttgtctcttcgtggatatgaactattgttgattcaattgcattatttttttatgtttaataacccacccattccattttgtgttgtcctgatacttctgggtgtgggaccatccagtggaccatgattgacccccccaggggccacacccttaaagaaaaccaactcctccccgctaaggtgccatctgctgtcaaaacctcctaagctatgggtagggctatggacccttctgtgggatgctgactgatttggtcctgtgaagaaacagctcccatgagatggagagtgctgccatgcccaggagagattgctttccgctaatcctcccctcctctgcctcctacaatccttcagcccctcttcctcaatgctcactgagcactgcgcatgggtgtagcatctctgtcttgtctgtggctgagcctccacattcatttcctccctgcattttgatactatccacagcacagagacacgtctttgatgaggactgagagctacactaaccccgacgcaggactgttctgcctctggctctgcagcaaccgccggagctatctggagactccaatgttcttaaaataaaggataacatctagttgttttaaaataatatttaacatttatgacatgtgtagcaactcctaacactattctttgttatattaaaaagtgaatccgggtttcactattcctggcttttcatctgaaaaattcattttaagatctacaactccccattcctcttttcttttcttttcttttctcttcttttctttcttttcctttccttttctttcctttcctttcctttcctttccctttctttctttctttctttctttctttcttcctttctttcttttctttctttcctttcttccttccttccttccttccttccttccttccttcctttcttccttcctcctttctttctttctttctttctttctttctttctttctttctttctttctttcttccttccttccttccttccttccttcctttctttctttctttctttcttttttcttctttcttttttttgtagaatgaaatgcacactctgacatattacaaaatctgtgtcatgtttgatgttatcgtcttggttctgcacagaaaagctcatgataggtatccagggagacctagcaacaaacacatctccatctctcctcttcatacgcacggctgaaagctggagccatctctaagaagtaaaaactgaagagtgaaacagaacattttcaagtatctcaagtgcacatgctggaaggttatatttaattcatatatatacattgtcattttaaatgcacaacatcacagattatatttttagtgaactgagtttctcgcttgctttttcactccacaaaactaagctgatttgctattcctgagtgcctcaaatatttttaatagaagaagcacaattgcttgcaccacagtgggttccttacagatttcccactgcctatgctatgggctagaccttatgatggtaataagaaatatcctctgacgttttcaagaaacgtttccaccttgtaagctaatcagttcctttgttctgatgagacccagaatcactcctcagtcactggggtgggtaataaaaaacagtcagccttgatctcactgcagatgtttaacttcaaagtacaatagaaatggaaaactgatgtgaaatcagctcttgcaggcaggggaggatgcctttgttcagacccaaacagaataatgggtcagtctgactctggactgtcacaggcatttgaagaactccagcctacatacttcagggaaaaataaaatgattctttcaaggcatttataatttgatttaaacaatagaaaagctttactttcagaaatattgcatatatcagcctgctaagaagcctacatccctagctttgaaaatgccccagcataagaaaatagtacatccaagtgcgggcatctcagtgctgcagccctgtggcacacaggcctcctcctcacaagggcatgggggaacagagcttttccttcatggtgaaaatagagaagtctctgcatacggacaggattaggaagccttggcatcaaggatatcatgcaaggaagactgaggtgcaagctgcttagaggagcatcactatgagacccaaccctcatgctacaatatcccaaaggccagcccttagaactgcgctgtgaactccagaccctgaggttttggttgaccctccctagacaggtgagcactggataaacagtcaccatgtctgtcaccacagacacagtagacgtttaaatcacttcatatatctatagctgggcattgctgctttcgcagatgtctgtttctgcatgtctgcttgtttgcggctctgaaggaaagcttactctgctcctctctggaaggtgttcagtcaaatgtgctagccactttgctggatgttcccacagaagggcgtggagctgctctcacacaaacaatcctgtatcgttaacaatcctgtgccattaatacttttctagacacaattgacaccatttttacaatgaccctcttcacccactgtcttagggtttccattgatgtaaacagagaccatgaccaagacaactcttataaggatagactttcattggggctggcttacagagtttcagttcattataatcaaggtgggaacatggcagcatccaggtaggcatggggctggaggagctgagagctctacatcttcatttgaaggcttccaggaggacactaacttccaggcagttaggacaagggtattaaagcccatctactctaaccaggccacacttcctaatagtgccacaccctgggccaagagtattcaaaccaccacagcccctctttccaactggggcaactaaaaagagggtaagaataatttccaaggtcacatgaatgttgaatgtaggggcatgcatattagcctgcatgtcattgactgttgtgctggccaggctgtgtgctatgggatccactgagagactagataaagcctgttggcttggtgacaacaactcagtgtgtgttcgcagacatggtgaggaagggcctgggctgtcataaatacagtctttgcaaatatagcttctagtcttaacatttttgcgaatcagctttcctgaaccttggaaattggcccaatgccataaagctctggaatcggaccatgcctgcagtcacaagagcacttgctgtgtgctacactgcccttcaatggacagctgcagggaagacaaatgtgaggacaaagtaggagacggaggtcaaagaaggagggaaggctatcttagaggggaaggcatgatggctggtggcttaaggtagccagacaagagcatgcaggcaggaagcaggtcacatgcctgctggcaagaagcagagaaccaggactgctgacactcagctcctctagcctttttattcactccagaacgtatgcgatggagtgtatccttccacttgcagagtgagtctttcccgctcagttaacctgtctaggcaaccctcattggtatagccaaaggcttatctcacagtcagttctagattgttaaattgctgatctatattgaccagcgtagcatctaggtggagcaacagcagatttgggaacctctacaccaaaaactattcaagcaaacccagaagacaagatgaatatcagctccttctggagaggatgttgctgtgaacctctgccttggggaagctccctgcagcattctgagttatagctggccattgggaagtctctgcccaagtctgtggcaggtcagattgcttcctgatggatgttcacacttaatgcagggcaaaaaactcccttctgtctctgcattgtcctgggaaaggggtccctgaccagtgagagaatcctcttttctctgaagtgccctgctgtgtgtgtgtgtgtgtgtgtgtgtgtgtgtgtgtgtgtgtgtgttttgatagcttggcattctctggctgtggaaatcctcaattgagaagataccttcatttaggcaagcctgtagggcactgtcttagttagggttttactactgtgaacagacaatcaccatgatcaagactactcttataaggacaaagttaaattggggctggctcacaggttcagaggttcaatccactgccatcaaggcaggagcatggcagcatccaggcaggaattgtgcaggaggagctgagagttctacattttcatccgaaggctgctactagaacacttacctctaggcaactaggattagggtcttaaagtccacacccacagtgacacacctactccaacagggccacaccttctaatagtgccactccctgagaaaagtctatacaaaccatcacaggcactttcttagtgattgatggaggaggtcccacgccatggtgggtagtgccaccctgggttctataagaaagcagtctgagcaaatcatttggagcaagccagtaacaggatccctccatagcctctacatcagctactccctcctgggtcctgtttgagttccttcctgatttccgtctctgatgaacagtagtgtggaaacatagctaaatcaaccctttcccccacagcttgcctttgattgaggttagcactggtagccctaactaagacattggctgtgcaagctacctcatcctgaagcctagtgcctaattttctaggaaagatcagagttttatttcacgtatcaacccagcagacagagagcaaagaatctatgagaaagtaagcaccaaagactgtcttggtttctttttcttttgctgtgatctaaacaagagggacctaagggatcttattccagctctcagctatatgtcacaggtgtcgtggctcatcctggctctaggaaccaaaattcttaccaataattttaactaggaatattgtgtgtgtgtgtgtgtgtgtgtgtgtgtgtgtgtgtgtgtgttagaggcagagcaggggctgtgatgtcagtgaggcattttgcaacctgaagtctccacatatgcctaaaaaaaaaaaataataattgtgattttcctccaaaatccctcagcaatgtgtctgataaaactatttcaactatttctgtttctgggtcaaaagtaaagagaacattctaaatgtacttttaatcttaaacatttaatgttcactggggttttttgcttgtttttttgttttcatccaggctggagccaacgtctttctgcaagatgtgaatggaaacatccctttagattatgccgttgaggggacagaatctagtgctatcctgctggcctatctggatgagaaaggtagcccaacacttccttttataaactctccataaaacaatgcactggtagaactgtaaacatgctcttagaaaaatacatatgttatttcagactgtgttgtctcccttgagggtgtaacacaaggcagttttctatctcgcctttcatttattggtgggttagccaatgttgacttttgcaaactggctggcacctgctgggaaacagtgaaggagtcccaaacagatgcctggggtccataattggtaagactggttttgtaattatgaactcgcctccctggagatagcaagatgagtgaaccgtacaattgaattctgggctaatgagagcaaggtcaccttgactgtaccctcccatgccaggtgatccctgcgggaattacaagcccgtttatggagggctggagacagcgagggcagtgtgtgcgtcccagaattctccgtgacatttaaagtagaagcaccatgagaagaaagcctagatcagagagaaggctggcgtaaagaaatggggctgagccccctgtgtcactcaccaggacattaatgacatagccccagcatgatccagtgagtcagctcagtgaggggggatgggagccactgccacacctggtagtaaagcttagaagggcaaatcccacccctcctcttttttgaagattacttgtaaataactactcctactccagcagtaaagccccttcaaggatttgctgaccagagacaatgttatggagtctttggagcctctgggggctgatggtgctcctttgtcttctttggagacgtgcttagctcactcccaacatgctttgcgtcctccagctcatttgtctcaaaggtttattttgaggatggcatagaataataattagtgcttagcagccctgatttcttaacaagaactagtctcattaatttagaaagcaaggtaggagtggttgtccctgaggtgaaggctaccaaggcaagtttggggcagaagcaagcttggggaggcatgaagcatcttgaactgcccactcagagtctgtgcaacacaggggtcaatgctcctcctcaagaccctccagactcccgaggaggaggaggaggactcccttgctggatacaagaaccctgggctgtgactctctagagcaaagttaactgggtctaccaggaacaaaacccaggtgatgtgagtttcccagtgggcagttcagggctcagacctttgaagtgcttcccaggcaggacagagttctgagtttgtataaaaactgtggaggagcctgaggttaaaaaaagtgactcgaggactctttatgtggcatgttcttatcaccgatagtaattttggctagagtgaaaggcagctcaatgaaatggcttgtgctggcttgtgacctccaagcgatgagccccactattggttgtccaatgcagagtggtcagccttgaaaccatatacacacagacatcagaaacagactcagcaggttgtgtgtgtgtgtaaatacatatatacacatatatgtaagtacatacatactacttttatataataataatatgtaatgttacatattatgtgtgtaacaataatattcaaagaaatagaggctatcaatttataaatggaggggtcatgggaggtattgaaatgagagtagccagaagggctacagagagggaaaggagaaggggatttctaaatttcaatatgtaaacctcagccccaataaaaggtggttaaaaataaattctgggcgctgaagaaaaagctgagtgatcaagagcttgggttgctcttgcagagcacctgaattagatttccaacaaacacgttggctcaaaatcatttgtgggtctgatgttcttttctggcctctgtgagcactgcatacatgcggtgcatagacacacatgtgagcaaatacaaatcacccacacacataaaaatacaattttaaaactattaatcatagactggaggtgtagctcagttagtacactgctggttcggggcctaggatgagatatactaggtgtggtgggacacacctgtaggtggagcacagggtaagccaggtgtggtgggacacacctgtagtctatcacttgcaggtggtaacaggaatattgggacactgagtcacctgtggctacataacaaatgcacatgaaaacctttatctaaaataaataaaatacaaaagaattaaatgaaataaaactccaaatgctgaaaggactgaaccatgtctttctcattcagccagagaaccttttctggtgattgtcttccttttcttgataccctcctaaggccacaaaacaaacctcagtatctccatctgcaaatgcattatcatctgtaatacgctcccagcccaccaaagcattttgtttaataggaaagcttggtttttgcaaaatcaatatttgtcatcaaatgtaaaaaaacaaaaaccaaaagcaactctcttcccatgggaagcaaatgttggttgggagagaaacgagatagttcatgactctgcttccgagaaaagctgtcaccacggtggccgtcatgattggtttgcaaaatgcaggtttgctggaacgaactcaatttaatatctcttaaatttttaattctgttccacacttgtcactgctgcggctgtgacccagcccctcccatgcaccctctctcccctcctgcacagctgctgatgcccctgtcagaacccctcctgcttatctgtgtcacctcctccgcccccataaacactgtcggactccatttattcccgccccctcattggtgaactgggacttatctgctgtggcagcacggagcgaagccatcaggagtttctaataggccaggatgacatctttgcctgttgtcatttctacactccgtgattctttgcaggtgctttcgatcctggatgcacccagctctgcaaagaaaaccccatttcaaatcagatgtactttgctgtcacatcagggagcaggggcagagggggcaggagacatcgtgaacaagttgattacatagaaagtctctgctgcaaagttctaattgtgctgtcaccaccaacttacactgtatacaggccacagcaattaacctcagctcagtgcctctggttccaggactgtaaaagaagaccagcgtgggagctgattgagcatctgataaatgcctcatcttgcacaaggcaaaacagctgggcatgcaaggaaggcaatccattctaaaatgagctctcggggaaggaagagccagggtagagctcaaggtggccaggagagaaaagaggcatggaaaaaaactgcatctctccctgcccccaccctgtctctctctgtctctctctctgtgtctctttctgtgtctctttctcactttctctctctctctctctctctctctctctctgtgtgtgtgtgtgtgtgtgtgtgtgtgtgtgtgtgtgtgatggccacccatatctgtatccattcatgaaagtatatacatatctatccatccatctctccatctacctaccagcattcattcatccagtcacctgtgcatacatatatgtatatatgtgtatgtgtgtatatatcatctacctatcatcatctatctatcatctatcttcatctatctaccacctctttatcatctatcaatcatctattatctatctatctattatttttctatacttttcacctgctctcccctctctttctaccctttcaggaacaagtagcttgtctgccctgttcctcacccacatgatgcccagcttcctgcccactgagaatgcccctgcagtagttgcctctggattcctgaactttccttcggggatttatttctctgatctttgaaataaaatctctgtgactttgcatgatgtcggcgcactaacaaagtctctcttgacatggttttcccatacctccctcccccctcttgaagcttcctcttgtgataccgtgagggtaccccccccaccccccagtctcatctctgcacctgttgactgtttctggtgtttgtccttgagaagcagcctactgggacaggacattgtgggtactgagtgagctctccctttgcttgctttgcctgctccctaactcagaattgtgacccaagtttcttcgaaatctctgatcctgcatgttgatttcttccccatcttgatttggaggtcagggggtttggaacagcttataccttgtgagatctctctctctctctctcccagccccttattttaccattacaacaatctgcatattatcttatttttgccagtccctcttgtctagttatcattaagtcttttgacaccttgcttctttgacacctctagactttgtccataccttcaccaatcacgctgtttctgccttagttaaaacccttgcatttctaacgtgtgttagtgcagtgtcttccaagcctgctctcagtgcaccccttccttcttcagagcctcccagcaaactcggctcatcagtatcttgtactttgcataatgagatttattcaaggtccttttctggcactggccctttcgggatcccacatagtcaagtgggggaagcgcattccagtctgcatgagatagtgtgctagtggccgccatttatgtgccagggcaaggctaggtagagcatcaaggcctcaagcccggatgtgattatttctctgtgctgacatcactgttagggatttttgcgtgcccagctctgcagcctccttggtctttttaggaagcttgccgtggagactccatgagctaagcttcaggcctttgagctaagaaaacacacactaaaagcatgttgcagcataccaacaacctcataatgtctctttaggtctgcttgcttgtaggttcagttttcttttgaagataaaagtattttttaggtttactctagtgatgattcagggatgtcatagagaataaaaacaagggtgtgcagattccttggacactgaattttggtgtgtgaacatcacacaaaccttcgaaggaaggaaggcttaattttccctgataccgctgttgcagatgtcttcatataactgaccctacaaaaatattaggtgagggcctggcatgccagagaatgcacatagggtgtgcagaggtaaagtgcttggagcagcaatgaaagagatatcgtgcaaagtccccttccgctcagagattgtcgcagggataggtcagctccaacacacagtcacaccacccatgtgacgtagcctcacacgagttgccaggcaagcagcatgtctttgagaacagcagctgagcaaagttacagaggtattagcacagttaataaacaaggtaataaaagtggccctggtaaaccattaaagatgaccgggcaacatctacggtgtcatataacttgtgagtccggggtgacagatcttgcttcttaattcttcaatttaaagaaataccagattcatcccaaataataaatccaagcaatctgtaggattattcattccagaaaattctatgaacataaaattacattttttaaaatattaaaaaagggagagtgaagactgagcccattcaccaacctaaccctgactaagtttaagggtaggaggagaagctctgccatcttggtggctttgttcagaagttaaagacacttgattgacgtgaggtgacagatttgtgttgtattggcttaacaaaaagggatttttttttcttttctaaaattgtatcaaaaatctaagaatcacactttcgttggcaccatgtttgattcaaatttgagtttaaagcaatataatgtcaaaatactccccccgtggtatcctggtaacaggaatgagaaagatgctctctggcttactgtgctgagtgtagctggccttcattgagggatatcctacctctgtgtctccgcctgtgtgtcccgtgtttgctacaatctacagtcagttttaattttagttagatgtctaggctcatgtactggaggtaggcaagaacaaacactgcatgcagcattgtggaatttcaacaagttctggaaccttggaggttttcatcacttcctctgcaaacctcactgttgacatccatggaacaggtctgaaaattaaatcacatgtcaaatcccatcatcctacaaatagaaagaagtggcagttttcgctgggtcccacagacctcgaacgccccattacaaaaggaagttttcccagcatggtatggggttgctaggtgatccggtgaggcgtggccaggatgcttctagtccgtttccattgacacagctgtatactttgccagagtagtgatcattcaaagctcattttcaagaactcttgctaaagagcaagtattcttctgtatgaaccatgcgttgattcactccagtaaatgataaaaaggcatttgtttgccatcctattcttttcagaggataagttacctctctgtagtgacacagcaaaatctatgagcacagctgtaaagcccagatgtagggtttccgggcatttctgctcatttcaccacttaggttcagaggcaagcctgtggaaaacagacatggggaaccctctgaggaaaagacttgcaaacagccctagttacgacttcctgactgataataccctgccccctgcccctgagacacaccataaggcctgtaaactgtagccccgcgcagtggtgtgtgaacgcctttaatagcagcactcaggcggcagaggcaagtggatctgagtcagaggccagcctggtctacagagggagttccaggacagccagggctacacagagaaaccgggtcttggggaaaaacaagacctgtgatttgtgatattggcctcttggaatttgttgttgcctctgactgaggatgctgaagccacaacagtaaaatgactttctcaaagtcgcctgagggagtgacagcaagctctagggtgctttccttgggtgttgacagtaagactcaaccagctaatgcagactatgttcatgacaatggttagctcacggctggcgtgtgcaagtgaacaatatctcactctcaacaccatcagcaccatcagcaccaccaccaccaacaacaacaacattattatcagcagcagcacccccaccaccaccatggacattgttttctttacctttacttggaagcagaaggaggaaccatagcttcccctgtttggaaccttatttttcaaatggatgaagatcatgtagcccagaaaccattctcaaaattgaaccagaaagtgaatatgtctcatgccggacataccagatgcatgacctcagtaaatgtctgtgtctaagaagcagtgttaggaacatgagatccataagtgacaagaccagttagatcaggattgtgctgttctaaaatctcaggtagaaatggatgctgatgaagactgtgagctgatgtaaggacacgtgagccaacgctgtccgtcaaggacctgctgactctccgtgttgggtgcctgtcctgacaggagtggtcctgacctgttcagttggagcagtcttctaaatttgtatcctgaaataattacacacatccaggaaagttccagagtcctgataagggatccccagatgcaacttgaagcacaactgtaccgtcagaaccagtgccacatagaatgtccttcagagctccgttacgtgagtggatggatggtgctgtgagcttcaggctttgttcatatggtgtcggcttctcagcaaaagtaattttgtttgtccgggatgctgaattgacgagcaagtatttctgtgagaaaatctaaccaaaaagaaaaaaaaaaacaaaaaacaaaaaaacaaaaaacaaaacaaaacaaaaacctgattgcttggcaccttcttccactgtaatttaagtacttgaagacatttttgactgatatatggtgggcaatttacaccaacatactaagtatattagtctagaaacttagacccctaaacagcctgccatgtgcaaacatgtacaaacctatacaaatggggaaatgaccagtcatatattaatttttaattaattattattagaaatgggcaggctataattattattagcaataggatacgttccaagatggacaggtttcgaggaggagggctctgaaagaggagtgtgttgaaagacgacctggtcctgagtcccagtgtctgccttggtaccaatgggccttcttctcccaggggtggacctcagctcgctgcgccagataaagctgcagcgacccctgagtatgctaacggacgtcaggcacttcctgtcttcaggcggagatgtcaacgagaaaaatgatgatggagtgaccctggtgagtccacacacatgtctcagaaatcatttacgtagggaattaaagttcattctaacgcatgtaattgggtacagtttactgttcaaaagatgtttcaacttaaaataatacacatatactctttgaagatatgttggaaagtgtaagtatgtaaaaaaaaaaaaaacaaaatattttaccagggcctagagagggcttgtgaaaatgtgtttttattttttcagccgtttctccctatgccactcttaaagatttaaaataaatgttatgcgctctccatggaccaggaatctgcagggcgtccggcttcctttccagggtttcctttagttttgctgttggttgagttactgggcaagacacagtggcttgaaaggacagtactccaagcacggtctgcatggccttggtgacagggcttacagacaccactgcacattgctctaaacatctgtcccacctgttcaaagttctgtctgtgtcacccaggaggaggtggccagagcccttcagtccaccttgtgactagatacattgtttctgttgtgacttaagtggcactagtgctggacccactcctcaacactttacccatcagccctgcaatgtccgttttagcttagattctaggcttctaggcttccctatgactggaaagaaaacctataggagctacctgcttgggctatttgtaccccatccataatcctctgggcatccggttacttctcattcagagacactcgagtgctgctgcatgcaggtgtgtaacccgtcctaaagcgttcttagtcagctcggaagactcttggatccctaccttaaccccgagtggcacctctcatcactaaactatacctaggacaggcagtttggctgagacagacaataacgtttccccaacaccccaggagcccccagaatacctgcaacacatttcctgcttctacttttgaatcaccctgttcagcaccaggggcggtccacgagtctgagagcccctctgcagatctttgacaggtgggcaggaggcattaaccctgcgtttagtgggatagcaccttcagcagctcaggtgactgttgaaggagctcatggggagcaggagttaccagggaaagtgcacatgggcatagagaaacaatggaaaaacatgatttcttcacaatccttagtgcttctttcacgatgtgccaatgacgatttacacaaaataataaaagtacatacccacactttttaaattccatactgtcgtgtttcagatccaatgctttactaaatagttcagcctacactattgaacagaataatggtgtgactactttttccacactggaagaataacaaatccgcccgtgtttcagctgcacatggcgtgtgccagtgggtataaagaggtggtattgcttctcctggaacacggtggagacctcaatgggacagacgacaggtactggacacccctgcacttagcagccaagtatggccaggtaagccagttttctaaatccttcctgaaatcttatttaacaattaacgaaagaacgctttatacttaattttgatttgcttccaacttatatgctactcattctatagtttgattcctaatggtgtcatcttactatccaagtaatttaataagaaaacttactttcccaagggcacaggaaatttctccccccttgagctctgaacatcacagctgagctcactggagaagcactcagcagctgtaaccgcccttcacagcgttaacgcagttttcatactgcaatgtggtgggccaattacgcgagtctcttagcgttcagtctgttttctgcactttgtatatctaaagtgaagttacattttatatcccattctactctgcaaattacacttcattttaatgaataaaagatgttgaactaacaccgtgctgctgtgaccaattacacaagaacagcaccttcaatgactagatatttgttttggctcaaggacgttgaagggtaagtccatagcttcctgggtccacacactcaggcagaacacagtggtagcggaagcatttgacaccggagtatcttcactgtacattcccaaactgcctgttccaaccccataggcgaattgaagagctataggaaaatgcttctctctgacttaaaataattacaatcaaaaaagaatgagaaaatggacagagcagaatcttgacccccacatattggtatgtcagtgtgtgataggtgtgatatttcaacaaagaactcagtttacagatttgcctccttcaagaaatgcagctaatgatcacagctccccagaaacagcttaccccagcctggaagccaactgctctctctgtacaaatagcaaaacttttcacgcagtgtgtcccagctcaaggctgcactaggcatgcactcttggcgtggaggtggtgacctgagaccctgatctgataccttgtggtccagtgagactctcaggcagcagagcctgaggccacaggcttcggtctctaccgacccgacccacctgatctgtctactcacacgggcttcctggctgcacgtgcacatgaggagcatgtcaactagctgtgctgtccaataactaatctggtctaactaataagtgctagaaaggaaagcattgttcttgtttaagaaggctttccagagagatgtgtttcctttcctgctgggggtagaagtgcttttcagtatttcaacaatcatattgctcatttttttagacaaatattttctacactctttgatttctgagacatttaaacagtatatattttctgaatgtgattttattccaaactatctttttcattaattaatttatgtattcactttgcagcttttctcctcctcctatttccccccttacggaacccctcctcttctcctctgaaaagagggaaaaccaactggctacccctccacacacacacacatacaccgtggcacatcaagtcactgtaggactaggcacatcctctcccattgaggccagacaaggcagcccagttagtggagcaggatccacaggcaggcaacagaatcaggttcagcccctgctccaggtgttggggaacccacatgaaaaccaagctgcacttgtgctatagatgtgtacagggcctaggtccagcccatgtatcctctttggttggtggtttggcctctgggagcccccaaaggtctaggttactccaaactattttaaacagtttagcttaaatatctttgtacagggagcttgatattatggctagtgagactaacaacatagtatgtgcgttctggaaccagatagtttctgtgacttggatgaatggctaaagagaattaaaaaaaaaaaaaaaaaaggaagcaaaacaccccaaagtaaattatctcttccacaaaacatcataaaagggactttaacgtacaaaaatacccttttcagatccttgggggttaaaaccctgtttgataaataattttttctaatatttaaattctgaagtagtttggctgtctgatgtgttctgagaagaacctgggaatagtagaatgccaagaacaatgttacccttagccccctgccatgccaggagccttgcaagggcagcgaccatgtgcattaatggctgagttcttagtaccctgggtatttacagatcgccctcagtgccctgagtacttactgattctggtactcagtgctctgggtacttcctgattcaggtcctcagtgccctgggtacttcctgattcaggtcctcagtgctctgggtacttcctaatttaggtcctcagtactcgggtacttcctgattcaggtcctcagtgttctgggtacttattgattctgatccttagtaccctggatatttgttgatgggtcctcggaatccttggtatttactgatgtgatctcagtattctccacggatgggtcctgcatggccgcgctgatcaaaattgtctttttgctgcagacaaccctggtgaagctccttctggcacatcaggcaaacccccaccttgtgaactgcaatggggagaaaccatcaggtaggttagagcaggctgggagcctctttttgttttgacatggacactactcatccatcactggtgcagccagaagtatgagtggacagacagacagacagacagacagagagagagagagagagagagaaagagagagagagagagagagaaagagagaaagagagaaagagagaaagagagagagagccagtgttctcctccctgtgctgtgggttactgatcgcagtgggtaaagccaggctgccaccgccttcctttcacatagcttgtatgcactgagccctagacacacatcaccccacatcactgcagaacctcttggactcttatctcctctgttactttgttgtgagctactcacctattctgatacttttttctcatagtgttttccatgtgaatacttagacttaaacacaaactaatagtctggtgctaacttagatctccagcctctttatttctcaagggaaaattcttctgaagacttctgtaatcttctttgccaccaatgccctcctgcatctaatactcttagttctgtagcttttaaaatttaacgcccattacttctcgttgctatttttgccatgttaataggagaactcaaaaaacaaagagatgtctcacataaaaaagtataacagtcaaaaattgatctttagaacaaaagaaaacctattttttcttatagctgagccctttctaacttaaaaacccttcatgttttaactcccagtctaatcactactaagagtaagtgaaaaccagagcgagagacttatgctcatattttttattaaagtcaaatcgcttactattggttgctttattctgcctgctaaaataaatcaaagctctaacaaacacaaggggacagttatcagttccctcagacttcagagctaagctaatattagtgagagcctaataatcttatcatgaactgagattgttttacttaatttaggactttaaacctaatcatgaggattgaaaaggcagctgatgtataatatgtacctaaatcccagcacttgagggcaaaagctggaaggttgctgtgacttcagtgccaacctcagccatattttgaatgccagatgagtcagggctacacagtgagaccctgtctaaagtacatcaaatcaaacaaaataacaaaaacaatattttttgaatgtagcttttcatcttaagagcacatttgccggctttgtgtctcatcggacggttctgtcaggagattttgtgactaaatgcccattctcagcttctttatagactaagaagatgtgactgacccttgaccctacgcatgcctatgcagccatccttgtattatctcattttaaggctagtgtcatgtgttatgcaaccaattcccaatggcgcctgactctcacgggggcccagtggatggtgcctgactctcatgggggcccagtggatggtgcctgactctcacgggggcccagtggatgatccatcttctgctctggctctcgcctgctctgtgttatccttgcagaatctgacatattaccagttcgtcattcatagaacattggcactgagagccagcacttgacttagcagggaacttcaataagtgtgtgttcattaaatgaaagtgtcctttatttagtgcacttgacctgtccagaagaagaatgagccaggtaaataaagtgctatagaaaggatgcaaacgaggcacccttgtggcagagaaagtcaccaggaatgtcatgtttgatgatttccacttccccggggcttgaatgtgggagggcacagtctacggtagcctgcagtttagtttataagtgtaccagaaaggcaacctcccaggtgaggcagctgaggtctcgtctcccttcccactactcgttgatcctaggccagtcgtgtcataacagaatactggcaggagcatcatctcgtgtcagctaaatgacgttgacaagcccgtaaagccacaaatgtacggaaacctctggcttccagacttagtgaggatgggggtgtggctccctccacagggctctccgctggtgtcattgcaaatcttcttgagattcaccaggtcttactgacagttattgcttattatacatttaaatgatgcacatctgtaccgcagcccagatgtgcccagaggtcactggctaaagacccatagtgatcaacattttcaacagaacagaaaaggtcatagaaagcggccagaagtgctactcagtcacagggaggagctacaattcgtgtccggagtcagtggaacatgcacacatactcttccaagtttagcttccctgtgactttttctttccccgttattgcccaccaaatatttataccaatttcatgtgtagttaagtgcatccctgctgtatgacagggtgggcttggaaaatgtcagactcggattttctctactaaacttttgctgattcttgataggcttggtatatctaccgatccattcttagttcaagcatgtctgagttatgagaggaagtgttgatccattccccctctactgtgtctaacacgcttactgcatcttgtagacatcgctgcctccgagtcgatcgaggagatgttgctgaaagccgaaatcgcctgggaagagaaaatgaaagagtctccgtcagcccccagcttagcacaggaagagctgtacgagatccttcatgacctcccagatctctccagtaagctgtaagtattttattccagtgtgctgcagcagccgggcagtcctctggaagccagctgtctccacgacttctctcagtcacccatcattgaatagagagaagatcctctctctctgcccaatgttttataaatattgtagttgcttatcagcatatttaccaaaaattcgattgctgacgttgagttcatcataactgaagacattattgtgacctcagaaggcatcactataccatcaagcctgtgagctccagctgtcctgacagtggtgtcccaatcattcctctagagtttagctgaactcatgtaagctttccagcgattatcataatggctgactgatctgaagtagcaaatgcaagtatgccttatttttatcctaaatataaatgtgatgattccaccccttccaaaaaaaaaaaaaaaaaaaaggtaacgcttaaagctgttgggtgatggagtgaaaaatcaccattgctttcaaggtctgagaaagtaccacgaagtgaggctgaaagggcaaccaaggtagctcactctaatgaacgggggcataagtgtatacttgactcatgatgtcatccccatttttgctttgaatcctttggcttctctgcttctcagcatcacaagaaccctcatgagctaccctggatagaaaaatcaaaaagtacactaacagcctgacaggagagagggaccaacaggaactgttcatggataaagggtgttctgagaggatggaagtgtggtttaaaaaaaaaaaaaggtagctgtgaccataaccagcattgtgttaggcctttccaaatacctagacagcaaaccataaacaaagatgaggctgtcaacagtcccattgcgcatggaggcagggatcatggggcatggagggggggggggcactaagcaaacaggaacaatcgacacctcccgaaatatggaggaggaacagtcattgctctcagctgtgtaccaagtagtgagctcatcctggctccagtgcagaagttcagacccaaacaaacacagtcccggctaaaatcagtgagtcccacaacacagcaagaaggcgggcatgtgggaaagagttctgtagggaagacataggtggaggaaactagaagcaggtgagacacacacacacacatgcacacacacacacacacacagagagagagagagagagagaaacagagacagagacagagacagaatgcccagatacatgtatgaaattgtccaagaacaaaatttagtcaacaaaaaagaaaacaatttcaagtgtaaacaagattatgtggagtaagcaaatgtccacctttgtcctgtccatagcatcttttgtgctttatcttattttcaagatgaaagagaatatgcagttctaataggtgcctcttgtggttttcccattattgactaaacaaaggattaatctggttatgagcagaataatcaatggcttatttgttctacatggttaaaatgtagtctgattacattgtcctcctgttgcctggactctgtggtaaatagtaaatagatgagactggtggtagttgacatctgagcactttccacaggtttgttttgtttgtttgtttttgttttgctttgcttttgtagttcttggttgacattttatctggtcatttctattgtgcagttatgaataaatataacaaaagcaaatatgtgtgataaaacccaactaaaatgcatgtttgtgttaagggctcgggtttccatgggggcatacttttggactttcaggaattatcagtaattgctgctgcaaggctaggtgggaagtgtgcagcccatctggaggaagcacagagaacacctgtcaggctgatggctgaaggtaaagcatgttgatactgtgtctccattgtgacagtggcttttgatttggagagataacatttctgacacatgatggcaatttctctatagggaacaaaccagtttgttaagataaaggcaggaagcccatgagtccctgacagattctttactcactaccaccaagccccattcttttaacccaggtgttcacagtccccttcttacctccttttagagtaaacttggaattctctctctctctctctctctctctctctctctctctctctctctctctctttctcacacacatcttagcttcaaccctctggaataatctatccagctattccttgagttccagtaaactgggtgctgttccttaacacaattcttgatgatttaaataaattatttattcctctacttcttcctcctttgccctctttcctgcttcctttgcccacttccctgcctcttcctcctcctcctcctcttcctcttccttctccacctccttacttcctccatcacactattaataaagaccaaaaccaagctcttccaaacattgagcaaatgtgccattgagtcaaacctcaacacagcaggtataaccttgaagctttgctgacatacagtttattatgaaatccaattctctagctgcctgtagagaccctgagctttaggaagacaaaggaagcatttgaaaaccctcaaagtggtagtgggaaagcaaatgggaattggaatatgcatatctttctctgctctggtcaggcagtcatgagctggccacagttattcccttaaggtcatcgtgtcttatctgagacagagtggggtacattcattggtcatgaagagacaataagaacagtcccatggtgactgttgcaaggagggtgttgtggcttctgtgtcctggctctttataaactgaaaattgtaagcaccctgatgtaccttttcttccttgagaaagtgcagatgccagctcttgaaagccttagccaggcagcattctccttatcgcaacctgggaacaacccccaagtcagtgcctggggggggggcttcagattgctttatctgcaacaatcaactccccagagactgagacctcctcccatgtcacaatcagaggctgcattgtcatccacctccatatcaagtggcagctcccaactctgaatgagaacagccagcaattcatcaccctgacggactcaaagtgctctcatggccccagccctgattctgcgggctttgctgtcacatctgcataaagcttgcccatcttcctgtctgcaccatccccattcctttccattcctgtccagagtgtatttcaccagcactattaagaacagaatggttctttctaggatttcagaatacaataaacacttcctttctgctctaactccactgtcctttgagcatgcaccccatcagaaatgcatgtctttaagcattaataagcaggggcagtttgtgctactgggtcatctcatagtctctgagctcaaagaccaagacaaataaattctttccatttaaaactgccctagttggagactcatattctactttggttaaaacaggaaaacccagtacaagatggcttgtgtggttttttccttcagcatagtatttttttaatgagttagtagattgttctttctacaacaattcacatatcaatattgccttacttttaaaaaggttttcataaccacagagttcatatatccacataataataaattctacaggacacacagcacattaagcatcacatattgtgactacctggttaaagcactacagaatagaattgtaaagtcttaataaaaccaccaatcaattcatgaggaatttttaaagaaatctggggctcaggagattgtttttggtcttatcatattgtatttccatttccatcttagaaataaaatcctatttatcggatttcctgcaggcaccttttcctatttgcctttttttttttttttggttttgttttgtttatcaaaataagtgttgactaaagccaagcagaggtcaaagtccagtccttgtcattgccctacccctggaattctccacagtgggggctagcactgacttgatggcctgggcatgaggctgctttcattacccctgagttttagttgtttcttctgatcctcaatggtaaatttctattaccaatattgtctcctattttgtactcaaaataaatcctgttttttgaagaaaagccaggaagtgcagaaaaccttattcattagccttgcagagaagcaacatgaagacttcctcaggactgaaccggtggggagaagtagggcttgattctgctgaactcacagctcttcctggtgagctgggggaagtgctttgtgatgccaggcaggatgctcagaggtgtggccagggagacagcacattgatacagatggcaaaacagtgagactctgcaattatcataaaagtcctccgaattatactctgcatccccataaagattaatacacaaatcatttatattgcatattggctaactgtaaatgattgtatcaaattcaaaaatacattcacaatagcacagaccatggattgtgctaaaataaatgcagccggtcacgtgggaggtttcagttatagaagccatggaatgctgatgagagaaattagcaaagatcagaacagaccagtcaagagttcttcagaatgacaaatttcaatagtactagtattgaaattctcttcaaatccattcgtcaattaaacacattcatcaaaatcccgacaggcatttctgtgaaaattggcatagattctgggtttcacataaatatgctaaatgcagtgaatagccaaaaaaaaaaattaaaaagcaaacaaagttggatgtttcatgcgagttaatacttcctgggacaggccatcaatcaaatcaatacagtagtatatcagcgcaacacatgggagaaccctgaaatagactcaccaatggccaattgattttcaccaacagatacagctaattagctgagaaaagatgggttttgttcttaaaatgggtgctgaaacacccagacactgagctgtgatttatggaaagccatgtagacaggagaacacacacaaaggagaccacagagctagaaattccagaataaagtctaaggagtcaaccttgctgatcttgagttgagaaaataagtattcttagctaagacataaaaaaggaaaacctgaaaatgaaaaaaaaaattgagcatattattatggaaataagctgataggaatgtatggaagaagaccatcctcaaatgttcatctaaatattggtgtccagaatattggatgtctaatttctaaaagcagagagtttcaccccacactttactaaagagacactccctgaaactacagaacaaaaacagccaaatctcttctgagaataaagctggaagtatctcgttccggagttcaaactatactacagacctgtcttaatcaggatgaaactggattagcactgttagagaagaagaaaacagtgaccacagaagtggacccaagcaggtgttgccagctgagccttcacggggactcacagagggaaagagtggcctcctctgtaagtggctctgtgacagacagctggacacctgctcaccagaggctcaagaggttcttcactctacacctgtagagacacaaagtggaggctaataaaggtgagacgtgtgctttctaagaacaggagcccaaaaagggagagaacaaggaaagttacttaacacggaccttggctgttactttggatttttttttaggtacccaaagcataaggaacaaaagcaaacattcccaagagggacttcaccaccccaaaaggtggttgcacagaaaaatacttcactgaggccagtaacatgactcagtaggcaaaggcacctgccaccaagcctcgtgacttgatttgattcccaggacacacatggcggaagaaaaggcacaaatactgcatatgtactctgataaacacatacgtgccatggtgtgcacagcgacctctccccccaccacacacacacacacacacacacacacacatacacaatcaatcagtcaatcatcaatcaatcaatgagattttaaaaatatataacaaaagaattaaagttgcaaacctcattaattgataaatatcaaaaatatacaaggagttcacagaactcaatagcaaataacaagaaaacaaaaactaaaacatgtaaatttcaaaaacagctctaaggcttcagtatttcccagagaagacgcaccagtggccacgagtctttaggaacgtacccgctacccctaacctcaagtaaatgaaggtcagaacctcagagagttaagaccctactactttgtgttcacatcagtgttcttcataatgaataatatatagaaaaaaattctctgggcccatccttagggagatgggaactcagggaccaatctacattgggaaattatcaaactaggaaaataatcctcccctttgccacaacatagataaacctgagatgcatcaagcacaatagaataaggcagaccaaaaccactcataccttacaaccttgctcaggtagaaactctaaaggcaaatctcaaagttgcagagggtacagtggtgttctctgaagactggggtcacaggtacaaacatacaggtctaaaattaatatgctcctagggcatatgtggtcagcttgggctgtaaatcaatgccattgcggtaatcattctcagcttgtgccaagtcaccgccatgcactccttaaacacagtcagcttttatttaaccgtcaatatataagacagaagacatgccaatcaaaatcatagtgagacaccactgatacatttaataattgattccaatgggcacaagaagggaggagtaaaaaaaatctctgtgaatagttattttgattatgggactataaacatttttatcatatattactgaactgggactagagtggttgaacagggcattttctcaattagtgattgattggtcagggtccattacattatgggtggtgccatccctgggctggtagtcctggggtctataagaaagcaagccgagcaaaccatgaggagcaagccagtaagcggcatccctccatggcctctgcatcagctcctgcctccaggttcctgccctgcttgagatcctgtcctcactggctttgatggtgaattgttgtttgaaaccatgggggaaataaaccctttcctccccacgttgcttctggccagtgttttatcacagcaatagaaaccctaaatgagagagtaagagacactctctcaaaataatgaggtagagaagcaattgagggtatcaccctctggattcctaatattcttctgcaggcacatgctcggagcatgcatgcatgcnnnnnnnnnnnnnnnnnnnntcgagcatgcatgcatgcatgcatgcacacacacacacacacacacacacacatacacacacacatacacatacacacacagagggggaagggagggaaggggagggagggagggagggaacgagagagagagagagagagagagagagagagagagatagagagagagagagagagagagagagagcaagagagcatggtactatacaacaaatcaattttactgcatatgagacagataaacttaaaactcaacagaatgagttcactcagctctaaccagagttatccctgctcctatacatcagatgacacaactgtttgcgtgcatccacttgacaaaatgggcgtgcatttctgcttgagtgctaacattaaaggagattgttcttaaactttgttgtaaagcatcatgttgcaaattcagtaattatttggtggtgaatattatgaactcagggcttgcagtggcttttgtttatataaccctctttgccttgtttgaattatttgaaagttacaagcatttttctgtttgtaatatggcaattcttaacacttaacttttttattctaacatgcaatacaaactcaaaatattgcctatggctctgtacattaaatcttatacccattgtattttaattatgagtataacttgtttcatttgtttacaaatcccttttcacatttaaattcagcgcctagtgcagttgtgcacttcaaacagcttttaaattacctattgatctttctattacagttgaatgtatcctggtaaacattttcttttggagttaaaatgaatgcttttttttttcagaagtaaatctaaatgataggtgggctgaagagaaaactttacatttcctgcagcttacaggacatgtttttatctgagtaaacataccttctgtagcccaggctcccgtagcttttgatagaaacagcaatgttagaagaaaactaattttggtattgattgtttcttgtagaagtcccctggtgctaccaatcgccaagcaggacagcttactggaaaaagacattatgttcaaagacacaacgaaaggtctgtgcaagcaggagtcccaggatggccctcctgagaccagcatgacaagcaactgcggcaagccagagcaggtaacttcgcagggtcacagggaaaacctacagcattcaaagctgacctgtcttttattcaaagacaaaataaaagtgcataggctagagtctgtttaaaattcctgtcaatgtggcaattctactgtaggtcattaataaatacaattgctatttaattttagagaagttttaattttacagtatatttttaggtgtctttgatcattaagtagtatttttttctctttttctgtttcttccaattctccaaatacatatacattggtcaaagatgcactgagaggcatttctttttaaaagaagctatggtgtgtgtgtgtgtgtgtgtgtgtgtgtgtgtgtgtgtgtgtgtgtgtgtgtgtgtgatcacttaagactcaatgcctgatttaggggcgattgctttgctgttttggacggttatgagtttaagttttctcctttctgtgacagaagtaaatgattttctgtgcctggtgctttgtgaacgacagagctatgctcacctatgttcaaacatgttctttaaaactaagaaggctttgcagcctcccagcatccggcaggaccttccttgtgggtggtttctgtgttcttactgtcatctcttaggtatccttgatataagaacaccatgatcattttctgttccttcctttttggaggatatggtggggattttagattgctgacctgtaacacttactaaacccattaagattttccctgcaagccagatcacagatgcttcaggcaatcagccactggacggttcttcatagaagaagccaagctatagatggctgggtcatgcagtcacattccatacaaaagccatggaaaagacttttcaacgcaacaaagtacaaagtaccagtttagaaataagtatgtaatgtagaaaattttgaaaattaaaacaaaaccacttagtacctcttcctctggatttttgtaaaatgtagctttagcaaagggtaactccacagatgggtagttagtgactatctctggttgcatcgatcctctgcaaaaggcatagaaaaactggcttgtgcagaatctctgtaaggcacccatgccttctaaagctgcctagaatcgagcatcagaactctcttctgttgactgtgaaatctttataactacaaggagctgcccgccctgaaggtctccggtgctacgtgagtcactgttttagtgtaagccagccaacgagcacattgtttcacctgctattctagaacattttcctcaacccagtgcaaatgtgtggctaggggcaagaacctggacacttccagctggatgccgagaactgctcctgtgggctctctgtcaataccggccatgctttctctacttgcagtacaaactgacttgaacatcctagccttgtccctgagtaaaataggtcttctctctctctctctctctctctctctctctctctctctctctctctctctctctctctttctcgtttttagagttaaaaatgcatactaacttgcagaaagtttgggctttaattttgaatgttccacattcttacaatcatatgtactatataatatatcatatcatatatgtctattaatctgtctttatacatatatatatatacccatacctacattcttattatgaatatctataccatacatgagattgtatttgtgggcagtagtaggatgctcacaaagactttaaaataagatcctgatgatgatagaggtgggagaaatgggtcctgggttctgttcccagcatccacatcaagtggctcacaaccatctgtaactttgcacaccctctttgacctctataggtgcttgcacatataagtttcatttgctatctctccatataaggacttctgctaggatctcttttctttctagaaaatatatactgtttcatctttattttttatagattcctgttacacaaaacagttcactgatacaagaaaaccttcaacaaatctaacttaatcctcagaaagacataacatccatagtagcaatgagttactgagcacagcagtcctcccttgtcttttggtcctagtgagggtttctattgacatgataacaaacaccatgaccaactacgactacacttccatctttgtcttagtccatcattgaagggagtcagggcaagaactcaaacaggacaggaacctgattcttcaggactcctgaaggcaggagctgatatagtagccattgaggggtgctgcttactagcttgctccctctggtttactcagtctgctttttcatagaacctaggaccatcagcccagggatggccccacccacaatggactggcttcccccatctatcactatttaagaaaatgccttaccacccgttcttattgaggaattttcttagttgcagttccctcctctctggtgactctagctcgtgtcaagttgacaaagaattaggtagcatagtgagtatgtccagctctatttcctctcctgactccctttgtgaacctcctgcattgggcaattgctaagtggccttggcacctctgcctgttacctttaccaactgctgaaaggacactgtcacaaagtaaagccaatcttctcttccagccacttaacaccctgggcacccttccatcacccttggaactgagcagccattcctagcctcttcagtttcatgccttctacatacctgctaccctttgattctacccacagccacaccagtcctcaagggcttcccacacaccatcctggttcttctccttcatcctaagagacttgtccttccaaatgattcccactttcaacctgagcacagcccacagacaagggcagcctagatcaccacagagcaaactttttcagacatctgcttacttctgtgcattttctacacttgtaatttattatttatgtacttgctggcccctccagcagactgagaacacagagagatgaaagataacatctccttttatcctctttttctgtctttgcatcaagctactggcataaagcctgtcagagagtagaaacgctaggaacactgcgaacttgtgaatgtggtcctggagctgcttatcgcacgctgccctctcttctctgactgttacacagtggtaattaggccaacttactctggcttactctggtagtcagtcttcactgtcagctcaatgggatttgaaacctctggggatgcctgtgagggtttttccagagaattgtaattgaagagagaggatcccccataagtgggtggtttcatccaactggataaaagttgttgagcgagaaggtagacagctgagctctgccttctcccctctcctggttgacaccttgacgcagtagaccaagctgccctcacggccacagcttcctttccagcaatgattctgtttttctgccttctaaggccaaatacttcttttaagccattgttcattggtgtttggttgtaaggaccagaaaataaagagtcaccaaccacgtggctatagaaaaaccagctttccccattatcagcctgaaatcctgttgagtagtgaatcagattactctacctgcagcttctgctgtatggggctggtcactctgacctgcctttggcaagcatctgctgcatctactagggaggtaccttctactccccatgtttcctcttagagtcctttcctctgatgtcccctctctcttctttaattatcaaccctgacaagtattcagattgagcccgtctctgttcagtctgtggaccctgttcctactcttcctacttagccctcaactccctcaagcatttcactgacagtgtctttatttagcaaggggctatccactaatgtccacacttccccccccccctcctccctccaggatgtccctcagggaagttgacagtgtggccattgccacagagctcttttgagctgcgtaactaagcacaccagagttccatgctcagctgcagagctgacagtggaccaagttcttcccatgagtcgagtgtgagtcttagggtcaggtggctggttgttggaaattttgagatcagaaatattgtgccatttggtttttcagtgagtaactatgcttcccctgggatactgtgttctcatgtcgagaaatggatcagtgtccgatgcccaggaactcctagccatggcgtcttctaagtgggttatgcagcactgtgccctcctgaccttgagatactgaaggcagagcctccacctccgctgctagtgtacttgggcaacgtgcagcctgagagacagagcatgtcttatgatgcattcaccagctctggggaacacattcttaagtctagtgttttaagatgtgttatgatttcactctgcagataactcccaccagataaacagtgatgattatatttaaattattcagcaaaagaacacaggataaataatacgtgtgcaatgtagatatgaaattcaaggagaacacaggctatgtcagaaacagagaccacaagcaaacttgcttaggtttcctgtgtgtcctgggctctcaggaccctacacagattcttctatttctcagccaaggctgctctgtactatctgtcaagcatctgctactagagcacgctctgggcccggtggattaagcattgtgcatttctcacttggagactgctggtttccatctaattaaaagaccacaaccatctggatttatttgaaatacttatcttgaaataatctatttgaagtagttattgaaatattgcttggttttaaagggatgagtgtgattatttttttcccttctgccagttacctaatctcacagacaccttaatcttaaaatcgatgtaaaacagaataaaaatcacaagccccaaatctggggtctatcctgaaaacctgaccctgtcccctcagaaggcagaacctgaaccccttgcctttctatgcccaaaacagtctcaaaggcttagctctgggagctaacaaatacttgaatgtaacttgatcccttcaaagattagggacacacagatctgacttaaaatttggagataagaaaggtcagtcaacatgatggtggtcttcaaggcataaggaacttggcacaaggtgatgtgtgtgtgtgtgtgtgtgtgtgtgtgtgagagagagagagagagagagaaagagagagacttgtagttatggaacgtggaacacagaccctgatctgaatggtcctctcttcctcaaaccatctccccttttaacattggtttcatatccacgtggtctcagaactttgagaagttcctgaagtcggaacatgcacctgtgaagagctgatcagaaagtgaccacagttgatgagactggcctttgtcccaccccacaggtccaggtcatgcctccagctcccagcgatgacctagccacactcagtgagcttaatgacagcagcctgctgtatgaaattcagaagcgctttggaaatgaccagatacacgtgagtaccacagggctgccatgcaccctgggtccccactgtggaccacaaaggctgcaagtgatggatccctagaagcttctggccgtggcgatggctgaggttgagcttcacagagttcagtctcttcttgggaacattcttagtcatatttagcaaaatcccaaattcagaatgaagtgtaagctagtaaggactctgcagatagacaagggctcgcaatgatgtgttgggtctcaggaacctgggacaaatggctagttgaggtgcccattaacaaaccaaagcagatgctggccagctttcccagcatgcctcagtacctccagctccctcccagcactctttaccctgccccctcctcctctcactcccagggtgctgcatttcccttcccttcccttagcctgatcccaacacaatccagccattgtgggtactctgatgtcttggcctcttggccctagctgctccttttggttaggggctcctgtcttgctttccctctctcccctcctctcatggcctggtttagtctcccagacatgttcagtctgggcttttccctccacctgctttccccttatacccacagtaagtcctgtctgtacgttaagaagagtcgtgtcctcctcctcctctgactgcattttcacactcgttgtgccttttctgttgtcctgactgagtggagagatctttccagaaccggcaagatctgtagatcagctgcttataaatctcagtctgcctcaagacaccaatggctccatactaagtacttagtacttagaacttagtacttagtacttaatagtgtctctctgggcactaacctaactgtgtgtgtacgatttctgcagagatgcagaaaatgccatttagatggagaatgagttaagattgtcctaaccctttcctgtatgttagctttctaatgccagtaacaatgtagacagcctgtagtctcaaaatccatctctgcccacccccaccccctacccccggcctccctctgccccctcccatgtgctcattgattttgttctgtcccatacagagcccaggacaattcagtccaagtgcctgtggagatttccgattatgcccgaatctgtcacattctctgataacacccatttagtcctaatctacggaggagaatctgattaagtcattttcatgtaaatgtgaagactaagatttctcagcaagtaatgagttgtcaggtcctgattaacccacaagctgcagcccagcttctcaaggcttcaataaactgcctgccaccacaaatatatttaaaattaagcacgcgcatcacaattgttggaactttgccactggcataagtggttaagcctggctgctttggtttctattatctgtctccctggtgctttcgtgacctgtttctggtttttttttcttttcttttcttttcttttgtttcttttctttgtctttcattcttttcttttttctttctttctttctttttttaaatcttgttttattttcatactacccaggactataaatccaacacccagtgcatgctgctagtttggtctacacctctggtcctttctttgcattttatctgaataaatgtctaggctgccctggaactcatagcctaagatgtccttaaccttgcagcctccctgcctcggcctcctgagggttttatacaaccgagcctatggaaagactgagttggcttctgttccttagttcctttgtgtttgtcaagttcctctgtcccttaagcacctgctcatcccattcactattgggccaaccacagtccctgctttgacagccctactctgcagctcgggtcaacaccatctctgccctggcagccccattcgtgctactggggtcactatggttaccaccctccctgccctggcattcccccaacttgagaggtccttctttcctcaccatctgcactcacagtgaaccagaacgttctttgcagacagccaggatagccacagagctcctttccggagtctgtcctgttgcttcccatggcaggtagaacacagctgtttctctgaggttggcatcacagctgataaaccaggcagtctcagctaagacaaaccacgagtttgcttcattgcctgtcacgcagagggcaatagctgcccttctccctgcattggggactttccagggactcctctgtgctccagcattttccttctgctttctgcagatcagaactttctggaatcccactcaaatattatttcatctctgtgtctcctcttaatctccaaactgcatcacagtgtgctctctcccctgtaaaaacatgcatcttggggtaaggggttctccttatgctgtggttgacgtatggctcctgtgccagaccctggacttgaagatagaaccaggcagttgtatttgtataaggcctggtctgtgatgctgatgttgaaggctatcttcctatccaccaccccaccaccaccacaccacagtctttgaagttgacggtcttcactataacctacactattcagagtctttctctggataatcagaaataacatccgtgctaagggtcatgccagttctggacttgccactgaggtagctgacatcatatctaaaagactggcatgcaatctaaacataattccagacgattaatgcctttgggtatcttctatggactgttgggcatgtgaactttttactacgaatctgcaaagagattggaacactggaaacccatattggaatgtactttgttggacctttcagccagagaatgacgttgctggggctatccttgaccttctgattctctgtcctccctctcatacatgctggtcctccctctcacacatgctggtcctccctctcacacatgctgggactcaggcatgtttgtacggcagtttggcactttaattcaagcctattggagcgaatgagatttggagtttgtgtttcctatgtctttgtcttttttctttttttctccaaccccaaatctcaggagattactgttttataagtgtcagtcagctcagctgggcagtggtggcccatacctttaatcccagcacttgggagacagaggcaggcagatttctgagttcgaggccagcctcgtctacagagtgagttccaggacagccagggctacacagagaaaccctgtctcaaaaaaccaaaaaaataaaaaaataaaaaatataaaaagtgtcagctcatggtcaaaaggagctgagcaagcaggagcactaccttcctgagatagaacggactgcttaggcgatgcctccacactctaatacctgtgcttggcctttggcctctcctggctgttcccacctccacaccctctgccccgaaacccacctggcccataagacccctgcagctgtgtccttctggctcctcaggccctatactgataaggagagctagtgtttgacgtctccccagttcatcccttttgtgtgatgtggaggaatctaatccagagcctcacaagtgctaagcaggggcttcccacctgagctgtatccttcatctcatttcaccctgctgagacaggggtcggctaagtccctcaggccagccacaaacatggactcttcccacctcagcctaccaccgtgcttggatggcaggctctgtcgaggtcactggtgtgaacacctggccaggctcacactcggcttctgcttgtcttgagaatcccatgaccccctttgcaagatagagtcaggtacaacctgcagctctgccacccgcttcgagccccaccccaactgtagcatctcccttttcctttaggaaaggtctgggtctcccttggtttcctgtctgttctctgtgcagtagacagttatgcctgctagagtgtgctgcactgtgtcactttctgcataaaggaatgcatggtcattcagaggaaagactcagtttctggttccttgtgttttgtttttgaccatctgtactacagctctcctgctggtcaccttgaactaagatggccatgccagtgagtgcacaccaccccctctgctcccctaaaatctgcacaccaatggcctcgctcataaggaacttctttcccatggtgctttttcggtttcgaggttgctttccctgtttgtatggtttccacagttctccttatttagactctggtgtccatctcccttatggtacacacaaatgcatgcacatacatgaacacatatgctcaccatgcatgcacaatagcaggttcttcttaaagacagcatgtgtgagaatgcctctgagagcaaacatacctttttagcaccagagagagaggttaatatgaatttatctgtgacaaacagctgagtctgagacaggctattaatatttcatatgctgcagctgacctggttgtttgacagaattcctatttccttttctgcatctcatttgttctgtgctgtgctctgcccatagcctctgggccctgctcgggtcctccctgtgtatgccattccctgcctggatggggaattcccatgtagcttccgcctgagtgtgaaactctcatttggatattaggttggttagggaatttccatgcatctgtcacaatgggaaggagatggcttgcaggtgataaggcatgagcttgccagaaaaatgcactgatgagaacattgcatgtctggaataaaggttgccaacagtaccagagagagcagaacacacagcacagacctcggtggctggcagagaagccactcatcagtattttctacatagaagctaacgggacaaggaaacaacctgcaaagtcaatgcagaaagccctggcgtgtctggctagcccagagagttctaatggtagtggtagacaagccagagcaaagaaatcctgacagcttcagggtccctcatgacccatctctccacctgctgcctctgtaaccttttgctcaggtgaagcaggtcaggtggcaggactcccttaaggagcacttcagtgggagcacttcagcgggaggaggtcaagcagggtgcagccctcagtgccagcctctctctctctaaaggctctcccgtgatgggctgcctgaggtgtgctttacgatgcccactcactacttgaacggtgcttctggaagagagcgtgtgcaggctgttgagagaacaactcattagaacaatgagccacagggattctgtttccaccgctgagaaaaccctggtcagagagctctcttcaactctcatggtttatacgctgtctcctttgatggctttactgtaatattgaatcatggttttgtaactatatttttgcttattccagcatacatatttcgggagaatctcacatcccattaataattaccccaatataaaaattttcccctcatggtgggttgtatatttagggtgtccaccatagtgttgaataattaatggatggtagaactgcatagcggaatgcttgctctcattaagaagattagcctcacagcccctgaaagcagttactctttagtttctagcatgattacctatgctctcttagctgttcctgcatgcggtgagacgttcggtcggatttctcccactataacagcaggtcactctcactccccataggtttaaaccactattctatgttcagtttggaggacaaacatctgctgtttctcacaaacgctttccgaatgaatctttggtcagatcagtaattacttgaatttttcatcagctcatttcaataggcaagaatttccccttgtcactgtgagaccaggtttcctccttaaagctgtttgttttagagacttagtggtagattgatttatcatggaagcatagaattgccatctcttcctgattgctttgtcaattcctcattatgaaatgctccctttggccccccgcatggctgcctaagctgcctccccccggggttgataaactctcagcttttcgcctactgttgtttacatatagatcttgctttattcttttactttcaaactcccttgctctttatagtttgtgacatttttttctctaaagtaggtctttgtcttttagcggtagtatttggagctctaatgtttgctgtaattaccgacatatgtagacttaatctacatttataatctctattccgtttatccccatgcctttatatctcattgcttcaactttgttagttgagatgttttattttgagctttacaaatcctttacatcttttttccctatataatgacataaaattaattattccattttcttcttgctatagatttgtttattttacttctatattgtttacccagattgattatcacaaaatccttctgcagtaaattcctagaatctaaccaatttcattgctttgttcatataatttgaacatgaattttacatttattaagaatgcttgagtaagcttaaaaatattacaatatgattaatatacagttttgtgattgatacaatatacttttattgcttcaccatgttttccatgatggtttctaagtttcataattttagatggttctatttatgtgtttcatgaactatttgcatctttttgacagacctttatcggagacatctttttgcttgttaacccattcaaagaactcccaatttactccactatggtgagtatagtgctccaaatatcacattgaagtggcattcatgggacatacacatttgtattttgtgacatacaaactaaaagaacaacgattaaagcaaaatttctctgactcattctcacttgaattagcctgatgattatgttaatgtgttctgaggcaactttggggatcaaactttttttttaaccaaaggtatcttttacatttaaatatgtaactctcctctaatggtgaagacagaataaattaagtaatacaatatattcccatgcatccctgactagtttggtatcatttggtttaaagttcatggatgaatattgactgctatttagtccatagatggatattgactggtgtttagatcatgaatggatattgattggagtttagttcatggataaatattgatgggtgtttagttcatagatagaaattaactggtacttagttcacagatatatattgactggtgttttgttcatgaatggatattcactggtgttaacttcacagatggatattcactggtgtttagatcatggatggatatttgactggtgtttagttcatggatgaatattgaagggtgtttagttcatagatagaaattaactggtatttagttcacaggtggatattgagtggtgtttagttcatggatggatgttgactggtgtttagttcacagatggatattgagtggtgtttagttcatggatggatattgatgggtatttagttcatagatggatattgatgggtatttagttcatagatagaaatggactggtatttagttcatggatgaatattgactggtttttagatcatgggtggatatggatgggtgctaaagaaaagcttggcactatgtctgcttttgttgttgagtcatatttctatagtgtcttttctagctgtatgtttgcagcacatgcattatgcctggtaaatgtgtactgataatcaactcatttctaaacctcggtgccaactttgaaaatatcacagagacttgggagccagcatgaatggtattatagtgatacagttagtacaggagctctgttcttttgtgctaccctgggaggtgcttggcattccttcatcacttggaagtgatcacattacctcgattttacttggttcctattagtaaaaagaaaacaaaatttcccagaaaccagggcactacaaatactagcagtgagtaccagtggcagccataggtgaccaggtcaccaaaattaattacatttctgaatctctggaagtctgtaaataaactcttatgatgctcacaaggatgattttaggatgttgatgccaaacatcggggaacttgtaatgtaaagtgaaatgccaccgtttaaggttacttcatagatatttaccagactggaaacttgtgaagtgctgttctttaagccattggaatagcttaaggattgtggaccaaaagttgaggatgaaatctaaacctccatgttgtcactaggcctcctggaattgggctgagggaagggtgattgtccaggttctctctagatgctccgccaccaacccctgccctggcttactgtagacctgcaacatgtttcagtttcaagagttcctcttcatgtgagggacagagcagatgagtcttccatcttcggtctgctgtccacaggtgtcccagatgtatctgagccccacaggccagcgcagcccctcactgccaccccacctcttctcctgcgcagagagagccttccacagactgttccaggagcgaaagccacagaacatcatcctcaggtgagccagcctgtcaccttgggcagatcctaggactcggacatgttccccttcctcactcaacatgtttgcagtgtttcttcctaataaacacatttgtcttgttagaagggacaggcagatttcattgagaagttcctcagtgtagcagagtccatggcaaccaacagccttctatgcacttcacattgaagatttaaaacagcaacacagagactctgttttcaagtctaagaaaaaaacatggagaaagaaaagcttgctacactatgggtcctaagctgctgctccacatgtggtccccacatgcttccaagtcacagcttttcttactcacaaggctggcttgcttcagcctgcctctcctgttcacctctgctcccatttcctattagggcagatttttaagcctaataatgtcatatacttttggagggagaaacctcatttcttctttaagttaaacaagtcttccaagctctcataatcaagacaaaccaagactgagtctgagttgaaacaattaggggtgacttagtcactacagccctgcttttaaagctttgcaccgtggcatggtctccgtgtaacatcggtgataagggagaaaacttcagcctcttttaccttcgccttcaaggccccaaaagctcagctgaagttatgtgcactcactgactgtttcttgtgtgccacaaaggtagtgtagccagagagtgacccatactatagtcatcaggtgctgaatataccctcagggctcaggaaaccctgaagaaagggaggcagaaagagtgtaagagtcagaggggatgaagaactcaaagaaaataaagccatctaaatgaacatggtcaatgctcatatgagctcacagagactgaggcagcagacacagggtctgcatgggtctgcgtcgggtccaccatatatgcatgacggcttccagtttagtgtttttatgagagttctgagtgtgcaaatgagtgggcctctgattcttgtgccttctcttgcgatcttttccttctgttggtttgtcttgtccaattccaatgtgttaggttttttttttaatcttttcttattttgttttattattaccctttagaagccttttcttttcctagtgggagacagaaaggagtggatctggatgacactggaggtggggaggacctgggaggaacagaaggaagggaagctgtaatcaggatctagcatgtgagggggaaaatgtattgtcaataaaagggaggggggcaagttgaatatctccagaatagatattctataaattagcaccagataagacattatgtttaatttgctttacaaacttcattttaatgtcacaccataaagttagtaacttgtttttgtcccaggagcttctatgaatcaggtcgatggagctaagaagagatcattcatcaagttgagagttcagttattaacatttcaacgttttactcgaaaatgcactttaattaattaattagaacatggctcacccttcagccataggaagacaggtgccaggcagtcctctggagttctgacatccaacacctactgacaagacaggacacctgctggcttggtgtttaggagaaacctatccaattgacagtagagctgtcccatcaattccctggcagcatcattcctcccaccatccgtgagtctcagaatcatctctggttctttttctcccttttctaatccagtgaatttgtgttctcccccattttctctcagtggagaacgagggtcagggaagacccaggccagcaagcagatcatgaagtacctgaccagcagggccagctccagctgtaccatgtttgactccagactcaggcatgtaagtcgatatgggagtgcatggattgggccaagagcaacgccacttgcaaatacagggatgcatcaccatggtcaaagataatgcctagggctgatagttctgctggggattttctgaaaagcaacactggagcaatcctgagagcaaacaataagcctgcaatgtttttaaaagaagtggccacggtaaacatggatgattttaatctacagctattcattaggcttgcaccctcttcagcaacacatcggttcactccacggctctaatgtagcagttggagtcaacttgggaagactggcaagcctctactcaaatatgctaacataccggtgcctgatactcccaaatgaaaacatgaataaatcaacatgattataagataaatgccagttaactaatggaaataggagaatctattgacttaattgaaatgacagggaacaatagtctcccctctaaatcactagctaagataatcatctattaaaatgatcattggcaagagaacaggctctggaatttctcaaatgcagtctgatcactttatataagttggctttgatatttagtttacgtgactactttccaactcctgttgagctggttgggtgtaactctctcaagtctgctggcactgggggatgaaaaaaccctggctccatggagatttcaagtgattccctgtatgttttcttcattcttcatgacatgtttaaatcccatcttaaccatgggattccctacgttagataccatccacacaaacatcgttgtctaagtccatgaagcccagtgcaggttcagcaaagcatcctgaggaattgacagggctttacgcaagagtcaaaggaatttgtcaagtgatttgtaaatctgtgtaacagtacaggacatctgtaaaattcagtggacttgagaggtggaaactactagaatcttcatgagataaagatttggctagcagaatcgaatcagtagatagagcatccttcgtgcacagggctatttagcagtgaggttgagatggagagccagcttaattgaaaggaagctctcaggtgaagacaggtgagctgtcctgaggctgattgtgaaccctcagtggggggcctttcactggcagacacacagagagctgcacaaacaaacctcactaggggaaggctggtggcatcttaagcagactgttgtgtgatagaagcagtgaaggtcttgttcagttagcaaagattatacacgtgaaaggaagctagagagataaaagcaagagcgattggggcagagggcatctccagtgactgtcacacagaaagtgatgaaggaacctcctgcaattggcacagcaacagccttgtccaagccacatgcagccacccccacaagattaacggggctgtctgagaggtccatggcctctctgttcatcttcctgggacatggtactcacatgaaccatgaggaaggaaggaagacaaagacatggctgggtctgaaagatgctaaggagcgtgggacctgagcgaaggccagtcttgcagggcatccctgtcctatgagaggtctctcggtgtgtttgctgtgctgtgtactcaggggcaggtggagtccaatgctcagatgggttgctctcctcccctaggtctgcgagcagctaagcccccaacactactttgtctctaacccgtttatctcaatcttgatgatcaggagtgggtcttttctgtgtcattggacttattgaagcagaaaaccaccttttttgaaagaaattgcctgggacttcttgtccattccattccaaatgagtttcagactcactcaattctgttccaatgatttaaataagcctttattgagaagtccctttggagaggagaatgacaggctaagtttgattaatgggtgtgtggatattcattaaggagcccctggacctttatttctaggaaatacaatataattagctactttcacaacacatagtcactttaactattaaaacttataccacacagtataagtggggaaaaatcagttcaataaaattttaatcagtaaacattgagggtgcaaataggtattttttctatatattttcatttaaatttttatggctatgtgctcttcttataatcttgtttcagagtcatataccagttttagcttgtctcagcatttctcctaatacagttacttagcgccacctattggccgactagttaataaagaagaaaatagctggcagtttcaagcttggaactgccatctggaagaacgcagaagtgtgcactgaaaaggtcgtaagagtttacagttcttaaatggctttagtgtcacatgtctttatttctaggcaagacaaattggacaaggttattatgaagctaggattaagtgtgtgactctgcagccagactgccttggttcaaatcccagctaggagtctatggtcctgacagttgattctacttccttgatgagacagttgagactctgatattcaaggttgaaaaccgtcacacgtacacacgtatttacacatgtagctcatgttagggtgcgcgtaggcacatagtaagcacagtagatgtgtgtctacagtcagtcactaatgggaggagagtcattattggtcatgcacatgtctgctctgtgtcgggacaaagccacgtgctttaaacgcaagacgcagcaagcacccaaaagtcatcctgtgtcagagttcagcagagtgaggttgggagttgaaggagcttgctctacctttagagcgtgtcgcttgctcacctgagatggggaggcagctgtctgggtacacatcacccattattcatgataacctttcttataaaataataaaccaccactttattgtcaaatacaatacagaaatgcctcaaatctaaaatatttttaaatcatcctattttacggcttttaaaaataattattttgctgtatgctcatgcagtgagaagggattacattgttaattttaatatatgcatagctacctattcaatgtaattaagaaaacataaatcatattgatcacaaatgaactggcaattgtgtcctgcctgctatcaatttgctttgggttgtattaattttcaggcccaaataatagatttttgtaaagatttaatgtctcttcagaaacctaagcttccataccagatggttaaacacatttcattatatttagcatttttgatttgtgattgggatcaaagtgtcgctttataatagtcaatcatgcagaatgcttctcaaattaataagtgcccagatatgacaaatgccaagtttttatttaaaaaaaaacttaagaaatagactcaatacatttgcttaaaatgaataatgattatctcaaaaataatgtcataaattaaagggtgtaggatgaggacccattgaatcaggagagtggcctttggccatcaggtggctggcaaaagctgggttttatgtatttgtagagtcttgaaggagaaaggacttgccgggtttacacacagctggagacttgttcagtcatgatccttgctaaggtcccagtcagttgatggacaagaactggattttaattcatgctcaatatttgaagaaacttgtttagagaatatgtcatatcccgggtccaacagaggggcttcacactagagttttagaaccatgggatctcaacctttgaaacaaagcacagggcagtgggggagcggggggcatgacagtgacttcattggttgtttagttctgtttctgcaagagagggtgggttgcaatgggccacagtgcagccagaaaagaggttagcaaatctgaatattgacgcacgtatacgcgtgcccagggattaggaaggactcaggtttctgtcatttctaattcttctttaaaaaacaaaacaaaacaaaaaaccacgaaggagctggggctggtgcccaatcggtaagagtgtagaaagggctgaggtcagattccagcacccatgtaaaaagccaggaacgtcatctgtgagcttgtaactcctggcctgtgggggtagagacagtcatgaagcttcctggctgtcaattcagggaaagagcctgttgcgagggaggaatgtggagaatgacaaattaggttacccaaggtcatccccacacatgtgcacatataccatcagcccctcccctgcagtgtgtgtgtgtatgtggtgtatatgtgcgtgtgcatgtgcgcgcgcgcacgtgtgtgtgtgtgtgtgtgtgtgtctgtgtgtgtgtgtgcgtgtgtgtgtgtgtggtgtgtgtggtatgtatgtgtgtgtgtgtgcgtgtgcgtatatgtatatgtgcgtgtgcgtatatgtatatgtgtgtggtgtgtgtgtggtgtgtatgggtgtgtgtgtgtgtgtgtgtgtgtgtgtgtgtgtgtggtgtgtatgtgtgtgcatgtgcatgtatgtatatgtgcgtgtgcatgtgtgcatgtgtgtgtgtggtgtatgtgtggtgtgtatgggtgtgtgtgcacgtgtgtgtgtgtggtgtgtatgggtgtgtgtgcatgtgcatgtatgtatatgtgtgtgtgctgggtgtgtgtggtgtgtatgggtgtgtgtgtgtgtgtgtgtgtgtgtgtgtggtgtgtatgggtgtgtgtgtgtatgtatatgtgcacgtgcaggtgtgtgtgtgtgtgtgcgtgtgtagaacactggcctccatttctgtgcaggcaggtaaaatatgtgacattaatagtggctacagtcttgtgtgcacttgtagtttccacctgaggcgaggacagcctgcattatgtggagagcacagagccttcaccaagcagcaacatagtcccagcagcaaggctgcaacggttctctgtttttattcattttaaggggcagtccaatcaaattctctctcctactgcaggccatatacatcgtggaggccttcggacatgccaagaccacactcaacaatgtgtccagttgcctcatacagtactgggaactgcagtgctgtcagaggagaaagcacataactggaggtgagtttgcatgtagccagcagagggcgcctgctcctagagagacagaggccatgggggctgtgaagcttacattcactatctagacaaccccaagtcagcacacagcagagagaagccaatgacagcccatcaccggaagagaattcactcgccaccacttatggatttataaacctcttattcgtaccctagaactgtcttataataacgatgaccaggtgtgcccagaggagcctgggctgccttgtgcatcctgaggcgtcaggtttcaagttcagacttcactgggaatcaaaaatattctcaagtgcgaggtgagcctccccaggaggagtgctgtataaagcacacaacacagaaagaaggacttatcaaaaaagacaaacaaacaaacacctgacaggagtagtcctcccacaaaaatgcaaaccctcaaacaaattatagccacgtgcagttccttcacatggcgcccagtgagatctgtttaaatcaaatctgattttttttaaatgattgaattacaaccaatctaaacattaaagcaaccaccaaactaaactgaaacagaatcggtttcttatttgctttaaatattagctgtgtatttttttttctggaaactcatttacaattcaagattttactgaccagtagcaggttctgggcacagtctaagattcctaggtgagaaattcccagagaccagacaggaaaggttgtgactgtcctttgccacatggctgtgcagacccaggtgacgcctgtggtcaggttaaactggcagtctgtgagcagtgtggcgtcccaagtcactcactggccacttgcttgctccactgtgtggcaggacattctgtggggagcctcagagtcactgatgtttgagagcatagctcctactaagcctaatgcagcctttcgccatcctgatgctgatgttgagagcctggatatcacaaacatagtccacgcactgccaaggagagaccctgcatctgcctcagagctcacctctgctccttgtaaaaggaaactgaaaatcgtgtactctgagacaattcatcatgaaactcaagtctgagtgcatcctctttgaagaacaggcagggtgacgctgatactgggcagaagagactcaagtgaagactgtgatggacttatccattttaccatatggacaggacttgagaacaaaagtgtgctgtgccgtgtaaagatacagtccatgccaatcagttaatcacaggagcatccatcatagaggcgcaggggtgctgggagctttcctgtcatgacagtgatatgctcagatacgttgagggagtggaggacagagccttgaaagcagttgtatgcagtcggaacactaaggcaaggtcgctacaaagatgcttgcttgtgccaagaaaactctcagtctggagaggagacctctgaccactgctagtctggtattctgaggtcccgggaaggatacggcagccttgcttccctggtaatgtgagcatccataaatgaagtgggcaagaagcctgggaatgttccagaatgtcaggctctgatacctgctgtaacaaagtgttgtgtgggacttttcctggagggacccaatacacacacagagagacgacacagacacacaggcacagacagacacacagacacacagacaaacactaagatggaagtcacagaagaggatgcctaatgacaactgctggctttcacatggatgttagagagtgcaccaggatgtacacacacacactacacataccacacacacacacacacacacatcatacataccacacacacataggtgcacatacatataccacatacaatacacactacacatataccacacatacacactatacacaccacatacatacataccacataccacacatacacactattaatattcaccacacacataccattcacatacaccacacgcacacatacatacacacatcattcacatataccatacacacatgtacacacaagccacacacaccacacaaaacacatattgcacacaccactcataccacacacacacacaccacacaaaccacacacacacacatacacgcacacacactacacacaccattcgcatatactatacacacactattcacatacacacatacatacataccatttatatatactacacatacaggttcacacacacacataccacacacatacacacacacacacacacacacacaccattcacatacaccacatacataggtgcacatacacatatcacaagcacactatacacacacgtgcgagcacgcgtgcatgcacacacacacacacacacacacacacacatgcactcacatgcacaccctttataaaaaggaaagatgcattaatttaaactaccaagagagctcattcactcaagctgagctgctatgaaagcagctgaattgtaaatgttcattacaatagctaatgaaattgcagtaagactattatattcaaatcaggtcaagtaaatgaagatgacatgatgcgtttgtgctttatgatagactatatttgcttaagttatcagcatgtacaaagcagtgattaccattgtattggtcacggagaattaccataataatgttaaggctgatagatgctttctctagaggttgttattagtgatttttaaataatttaacaccaattatttttgccagaatgtaatcacaaattgcaacataaaaaagcatcaggcttagttttatgaaccagcagttataaactgatttttttaaaaaatttgcataaattttattaacaaataacttatgggtctggctcccacctccatgttttccccagctaattacccacttaacaaagctatccttcctggttccccagtgtagaaaccatcatccttcaggattgagggacttcacctcacaggtaagtgcacagggagccagtgtgtaaacataaggaaagatttgccaaagaaggttccacggagtcagaaagcagcctgtatttgcccactgtcttcaccttgacggtcccctctcttgtccaagaaagcagaggtttgtagaccgccatacaagtacacctgtgagatgaaagaatgcctgtccccagtgcccgagttacagctcttctgttaagtggtgaacaaaattatgagattgtcagtcaccagagagcacatgcaaatgtttcctttcgttgaaaatgtatttccccctcacataatacatcctgcttacagtcccctccctctgctcctcccggttcccttccacttccccccacatccagatccactcactttctatctcttgttaggaaaaaaaggcttctaagaaacataatatgatacaatgggtataataatataatacgtaaaataggaataacacatcggaattgggaaagacaaagaaacaagcaccagtgtcagtggcccctgtccccgtgctcaggagtcccatacacactacgctggaagctatacatacagcgaggagctggtgcagacctgggcaggccctgtgcacgctgcctccgtctctgtgagttcatatgagctttgtgcagttgatttagaaggcctggttccttggtggccctcatcccctctggtcctgacactccttctgcctcctcttctgcagaggggaaggatgtgaggggagggacactgatcgatgagcagagcccaatgccatttgcagtcattttattgctatgacctacttcctaggtcccgagctactaagtgtcatgtgcttggccacccaagaggtgttgagtatgggctccatctcatggagtaggttaaatcagatataggttggttcctttcatgagctttgtgctaccattgccttattataccctgcaggcagtataccattgggaatcaaagagtctgtggctgggttggtgtcacgtttctctttggatagcatgcagtgtaccttcctgttccaaagacactgaaaagagagttcgaaggctcttcataggcaccagccccacctccccacgtccagtgagtttgagggtgttgttttcagttgcagcacctttccctctcttggcatcaggtagagagaaaactatagttttcttggcaacaacctggatggtttggaattcccttttggagagaggtcttgcataagctatatcttattatctaataccaaacaagtttataaagaatcacagcatcaactgggcagtggtggctcacgcctttaatcccagcacttgggaagtagagacaggcagatttctgagtttgaggccaggctggtctacagagtgagttccaggacagccagggctacacagagaaaccctgtcttgaaaaaacaaaaacaaaaccaaaacaacaacaacaaaaaaagaatcataacatcttactatacagttttaaaggggaaaatatgggacagagtgaacagaaatccatcatacaattgaatctaatcaagccatgttgcacaaaagaagcacaggatatcccaaatgtgccgcagatagcacagagaacttcaaaactgaccactatggtttcttcaggtggaaaagccaagttcccagaaaccatattccttcagggccctgaccctagccccacaccagaccttcccagatctgcttctggtcagagtacagaactaggttccctttggctttggagataaagaaatgggcttaaaatacaaaggcgcccaccagcactgagaagacagtctgagacgccatatttagtggtaccttctggaactccagagggatcctgagatggtctgtgctcccttcctcctactaaagatggacaaaaagacaccaaaggtgaacacagcttccacgccaggctcagtagcacaaggcctgggattgttcccagaagagctcctcccctcacatcatgatccatgatggctcacgggaagatgactgctcacctcagcatgagtgagcccaggctgtgaagtaagaagataggcatgggtggagtctgctaggtgggaggagatgaggcttggagggggtagcctgaaggagagtaactcatttcttctactccccttaatagtgaacaaaaattggcctgtctctgtgaaatactgtacttgctgataatattgggtactgtggtggtttaaatgtgtttggcccatgggaagtagcactatcaggacgtgtggccttatttgaggaggtgtggccttgatagaggaagcgcatcactgtggaggcggggctttgaggtctcctgtatgctcaaatctggccagtgtgaaaaagtctgtcctgtcaacctttggatcaagaggtagaactctcagctccttctccagcaccatgtctgcctgagtgctgccatgttcccaactggataccgccatgccttccaccatgatgataatggactgaacctctgaacctgtaaaccagtcccaattaaacgttttccttgtaagagttgccttggtcatggtgtctcttcacaacaataaaactccaactaagacagctacaaacaaatagcatgtgttcatggggaaatatattcatatgtacatgtctggagacaactgtgaagggtgataccgcatttatggtcaagattgtttccactgtaaaaactgtttcaaagcatgcatgttgaggcaggctggcagttgaggggagctctttctggcaggcctggctgcagtaagtgctggaacctctcacatccagagcccctctgcctccttgaacttatagctcacttcagacactgcagcctctcctcagcttggactctgctctgcctgtgtttgagtctgcatgtagatgctctttcaaaatgctattttctttcaatcttgctcatcagaacccgttaatcccaagcaatttaattcactgctggagatgtgctaactagcatgattaataattaccctgcttaggaatttagatgagggttttccagtcactcgtgacttggcgtatgatcagtgcttcaattgaagctggagtctctgctgggagaagagtgtgggcatcagcctgggccaaggccagaaccagcaggatctcagcctctaccccttacctgctgcttcttacctgacacagaaaaccacgggcagggctagggtggtgacctgtggcacacctgcacagagccaagtgcacattctcctggctggtaacttatttcacacttaagatctagcagggaaaaaaaaaacaccaaacatttttgtttaaaaataaaataaaaaaaaagaatgaaaatgctaagatctaaacttcagatttctccttggtcagatcaccatgaagatatgcatgcgtcacacacaagacacacatgcatgcaaatatacaaatgcacaagcacttgacacacacatgcatacatgtgcacacacatgcacacacacacacacacatacacacacacacacacacacactgcagactgaggccatgacagctattcttggttatctactattctttagttaatctgaaattacctaaaacacaagcggctggatgtacctgcaaaggatttttcttaattaaatcatttgaagtaagaagacccacttgtaatctggatgttttgaggtgcaaagatccatctttaatctgggccacactttttgtggcagcctatataaaagacacagaagaagtgagcttatactctgcccccagctcttgctagctaatttcctttgctggagttagagcctacttctttaggattctggtgtatcaggaagaccagataagacatccagccttatgaactgaacaactactgtattcttgcttgaaccttccattggtagacaattttggactagctgggcgatagcctataagccatcctaatgaatgtatgtattaaatatatttgtataataaatatattgcaataaatgtatgcgtgtgtgtgtgtgtgtgtgtgtgtgtgtgtgtgtgttcattctttcagttctgtttctctagagaaccatgactaagacagagggaatcctgtgtcatagaataagggtagatcttgcacacagtgataagtttctctaaagggatagataggattgctagacgaagagtgagctcttacataaagcatgagcttttcagatgagcacagaccagcaccagcccctcagacttaaccaagtatcatataagctgcttccagggaccatataggctatggcagcaggggtcagggctctgaactcccaatgccttgggctgagtgtctctgaagggcctaaactaatgtagaaaataaagtctcttctatttttttttttttttttgaatgtctgtgctggaaaaggagctttgttgtcatggtttataattaattaacatgtaaatttatggaaattgaattaacaatgccatttaacagaatcctgtctcttttcccaaccagccagaatttccacttacatgctggagaagtccagggttgtggctcagcctcccggccagggcacctttctgattttctcctggttgatggacgggttatcttcggaagaaaaatgtggacttcaccttaataacttctgtgcacaccggtgagtgatcaaaggctttataacagtttcctgaacattggaagcacaattctcagcttcaaattgtcttcatatgcccaaggaaggctgttggccactgtcagggctgagctatctattaatatgctggactgtcttactgtgtctcagatgggaggacaaaatcctagcattctgtaagcatgcggatgctgtttgggaaacactgtctgatctgctgtcatcttgtaatgtgtcgggccatggtgcgggtagctaatagtcactgggtttacacaagaaagagaggactctcagtgctaaatcaagggtggttgttcttcatgggaggtcaaagctttggggaaatgcagtcattggtgacacgtgaagtcacaaaggtggtctcctgaggaacactggttctacatactctctcctaccagaagccagccagaccccacatggcactgtaccagatttgtgtttggatgagaattagaagttataaggagtgaatggtacccagagcagaggctgctgggacgtggggtctccagctcatctctacttcactatgctaaattctctggcttagtctgttgtattcctgtggggaagcctgtgataaacgagtgtgtggtcaccggcgtgattccgtgatacataaccaggtcagggagccgcgtggtagctgatgactctgagatgagagagggatacctcagatggctcctgacatacagacacctattgagtcctcacatgcacttgggggcagcatcctggtcaactgagagctgtcccagggcttcaatggaaagtgtggtgttaagatacagcaaggggccattgcatgtgatcagagtgtgtaggaagcataacggtgacttcacgcacaggctacatcagatgcttgtctctcttggaagagatgttgcagggccctaaactgatacaaagccatgaacctgtggtgtctctgtgaggagccccagcagggacagtcaggagtcacaaagagttcggtgccctgcaacaaagcaagtgtcttattagcgtgcattatgaatagctagtgggtgctattcatatgaggacaggagcccctgtgtgctgcaggatgtatctgcttaccccatattctgcacaaacctgctgatccctgtcttaaacaaacctcatctgaatttacacagtccccttctccttctctgcttgctccccccctctcacacacacactagccaagtatgatgttgatgaagtaggctgtgtcttactagtgtgcaaaccaccacagcctgcagcctgtctcacacacaacagctcgttatctacgtgaagcactaagaggcatgtgcagcagtccagggactgcagggcccttgcacttagtatgccttctgtgaccgttattctaaaggacgagcactgtctctgcctgtggttttagaatccgtgcagcagatgcatctttaacttcagctatgtgcatgctataaggtattctaaatcccacacagatacagatagaccctacatcagtactaaagtccacctatacacacatctctgcttacagcacaggaaggctcgctagagcacagcacctctgcctaactgcagagcttgctcagggcaggggtgggcacccatccctccagttcatgaaaacagcatttaccaaagcacctctagcctttatcaagctctgactaggcagaatgcatgccctgagaatcccacaagagggcgctctccccacacctcaaagggacacaaaccagcccagccaaccaatgccaaaccaaactttcattctttttgcttacactttttttcccgtgtttttcttttccttgccccacatttcttacgtaaataacatttcattttttgtgcacacagtgtcatatgtgggagataaatataatttatattcctgcaaatcgacatttaatgaaagcagcgtatgctgtcattgctgctcactttaaatgatctccctgctgggtttagcctctagaaaacttaggcttttaaacccgaagaagagactcttaatccccgtcctggctgactgatgatggagaggattgtgggacggcaccctaatgttcttcagcagaggtcaggcttcgaactgtgctggaaagcagtcatttgactgtgagcaggtgacctgcttctcacctgcgctcagagagctgagtcacctcaccgtggtttgaacttgtgatggctgctagcacctgtcacaggagagctgagcaattaactcccaggaaagtgtgttctctgctgagtcgttaactgcagggctggggtgaatctgaagacatttcagactttttttttcaaggtaaagaaaaacttcagggtcatttaaaggtgactctccatgactccatgacataccagcatttgttcaggcacacggttttaagcaagggaaaatctgatggtttataagacctgtgtgtgaaaactgcagaggggtcttgtaaacctgtgtttataagtcttatgacttaaggagtggtgaaaacccagacctggcccatgcttgccccgtgttctaagctgagatgccgaccctggcagcttgaaccattgggcatctgtctaggaagacttacgcaattttattcaaaactaagtttccagacaagttatattgtgtagctttttgcttgaataatatttttgaggtggtatcgcaagactttgtgagtcactccaccctcagcatcaataggcagctatatataggacttttgaaccagtgcatttgcatggatcacgtgaccgtgtcttaaatcagcgagatttctgcatgagctttaaactcgtgaactctttatgcacggaggcatctcttgctttgttgttgacactgggtgcttcgaggatggcttcctacagggctctgttgattctcagtaacagtagagagtcacctttgatgtcaccatggtgaggatgagctgaccaggggctgcagcggccagccaggtcagcagctggcacgtgccaagctaatgtgaacatgcctggctgtcccatccttggtggtttgggtcagaatctgcacagtattcaagtcggtagtgatcccacctcatttcaactgtgtgcttgaccatttcttaattcccctcccctcaccacgctttggacagttaaacactgttcaaatttaagggtgaagtcacacaataagctaggggtcagaaggattacacaagagggttagacatatattttagcataaatggaatttctcgtgagatttctagtggggggaaatcacatttgattggaaaggttaaaggtcacatgatccagggtgggtgtgtgcttccttgtaattttatcatggttacttgaagcacttctacataaaaatagagtaaacactgagggtgcttagaacagagcattggataagagcaagctgttgggaggtagggcagacactgtatcgtttgattttatcaaaccatgttttatgcatggccacaaagaccaagccccagtctctgagggagaggatggttgaccgccctccaggcccctccactgcctgactggtggtggcttcagttgtgggaagttgtactgaagttcacacgttactaagtgagacggatcagcctgccgactcctagtgggctcgtgcacttcagtcatggaaagagaaagtcattcttgggtcagaacacagctcaacactaatccgggcttggcatgcattagcttgtgagtttggagacgtggggatctggccttaatgacttactcattattcccaaacccaaaacgctctgagaaccagacgtttatttatgacttatgtggtggtgaaaacccagacctggcccaaccttgctcaccatcgatgttcgaagctgagatgagaccccggcagtttgaaccattatgcatctgtcaaggaagacacatgagattttattcaggactaaattgttttttgattagaagatgttgccccaggtctaccagggatgaaaacactacttttgcttttttaaaatgtggatttcggaatgagctttgctttaacagcaaagcagggtctgctgcagcatcacagtgcgcgggtctgagcagagtagggtccagctttctcactgtgttccagacacctagcacctccaggacccccgcagagcactggctgggggaacattagtaagacacaccttacctctgaacaggaagctcctgccgccttctgtccccatcctcccaaaccctacttacttattataagcatagatctattttactgcctgtaaattatgggatgtgagatgggcatagatagagaccattgagtggacttcggtttgctcagctggtcactgtgactggatagatagatgggagttttagatttgggtaatgaaaaagggcaagggcagggctactgggtggtcccactgagatttcacagggtcatgttcacagcttgtgtgtgtatgtatgtttttaacgtgtgactgtgttgtgtgagagtatatatgtatgttatgtgtgtctatgtttgactatatgtgttcatttgtgtgtttatatataagtatatgtgtgtgtgcaggtgttttcatgtgtgcatgtgtgtatgtgcgtatgtatatgtatgtgtgtaggtgaacatatatatgtatgtatatatgtatgcatgtgtgcttctgtgtttctctggcatgtgtatatgtgcatatgtgtgtatatgtgcatgtatgcacatgtacttgtgtgtttgtataacgcgtgtgtgtgttctttcagatcttgttatatggatctagtaaagtgtcatactagtgactagtcccatctgcccagtcgccgcagcggccactcgctaagtggaaccctttgccactgcactgggcacccacactgccctgccagaagtgcctccttccctctgagtatggagtggggcctcccctaccccgttttgtattagtctgagttcctttgagccctggtaggcactgtccacaccccagcccccttctcacgtatctagggttttaacacatggtaacctctcttgaagtctccatgtgttctctggactgccaagacttcatgttagatagggttctctaaatgaccagaactggtaaaatgtattacacagggagattcatagatggttcacactgtgttctgatgatgacgatacttgagaagcagcaacttctcaacctgtgaggctcaacctgcctcagccatccagtgcggcttagaaggcagggtggactctggggagagccactcattcttggtccgctttggatgagtggagaactttggttcaaaagtcagtaaaggatggtggcagccactaaagccacagggtggatgccctcaccagcaaggagcaaaagcaggcaggcagcactgtgcctccgtcctgacatcctgtctgggctaccactgggaagtgctgcttactctgggggagagccctgacaccttggtcaatctttcttagaaaggcactcagaaactggtccaaaagcttgcctcttagttgaccccaaatctaatgacagtgacattcaggatcacagtctcggtcgcctggaggacacagtgtcatgggacccagctgaaggtaacctctttcctttgtcctagctgggtaacacactgccaaaacttgtgctctgacagagctgtcagctgaacccacctgtgtcgcaacagagccagagctgtggatgccggctgcatttagagaacaatctcttcagcaagagggactgcctatagcccatgaatatgcaacaataaacacagttcatgaatattcagtggcacatatgtgttttgccctgctcaaagcctgcatgctcagtcgttgagtgcagttgagaggagaccaagtctcctagggagagggatcaaaatacttctctccttcatgggccaggcagaccgctcagtgcatgtgggtgacagggatctcttggctcccactcagtgccaagtgtgtgcccgcccctaccccgccacccgtcactgctcctgaggaagcttttgcctattagcatcctacagagaacaatggagatcacacacttatgaagagattacaaggaagggttaggtttttcaggtccacagaagcattggattccaggattgtccctccactcttctgtgtggctgcctgactatggcctcatccaggatcaggcccagagtctttagtggattaaatcaagagtcaggactttgaatgacccggtcaagttgatgagtgacatatcagagttactgaagtccattatctttttctgttattgtttaagttatttacttttcatgccaatcacgccttcccctccctcctctcctcccagttcctcccgctgactacaaccccccaatctatccctttgccctttctcctcaataaaaaggaggtttcccaaggctattagccagccttggcatagcaagttgcagtaagactagatgcattttcttctatggtgacaagacaaggtagcccagctatggcaaagaggtccagaggcaaatgatgctgccagagacagcccctgctcccactatcttttgatggtggatcaacctgaatgtggaaaggcactggagcctcagggccccagggggccgggtaggatctctcagcaagtccctccaggcctgctgctggtccttcttccattctcattgggccacgtgattaatgctacacatcacaagctaacaacaacaaaagtacaaacagaaattaaaactcccgtaagaatgtccgctcacatatcctaggccagaacaccatctgagggatctaaaatataccgtgtttctgtgccagccaggagataaagaaaacatttttccttaagtgggactcatttagttgcaatgagaaagagtttgtcagcagggcctggaaggggtggggtggggacgaggggacttggtatactccttctgtgtgttttagggaactccctcaggctcacatcaaacatgtgggggtcaccacctcggtttttacagagtcctgggatcaggttatatgtttacacatctgcacgtaaagctaaagatacattctttaaaatcagaacttggaagttactaggggactgaaattaaaaaaacaaaacaaaaacaaaaacaaccacaaaaacaaaaacataaaaacaaccttcctgatgttcagcatggagttggcacaaggctcagcacacctctgttccagctgcatacagccaggtctggaacatacttctgtcccgcctgtatcccagttcagtgcctcaatgacatagggccaccaagtagctatgacagcatacactgacctgcgaaggatcaagccagaccaaaccccagcatgaagccctgccccttgctggggagccctgccccttgctggggagccccgccccttgctggggagccccgccccttgttgaggagctgttagcagctgatggttgctgggggagggaggctcagttttgttcagggatgcaacctccaagaggctccagtggaaagtgccacacccgagcccacacaagcaccactcttagattgctgtgataaagcaccactgctaacacgtcttgtaggagggtttatttgggcttatggatgcagcgggatacgagtttaccaccatctggcatgctagcacagcaacatggcgagcatagcatccggagcaggaaactgagggttcatatcttaaactgcaaccaagaaaaagggggccgggaggaggggaagaggagggagagggaaagggagaagccagcactacaccctggggaccaagtattcacgttcccacgactacagggacatctcatttaacccatcgcagtgagcacagtgggctttaaataaacagagcccgtgaaattggaagggaagatgggggactaggggagaaatcgttgggaaaggaatggaggatggttttcatgaacatagaagatggccaggcctgtcacgctaagggatctgctctcccccatctgctgactggtggcagcttcagcgggtgtgggtttttattcatatcaacactctgctcagttaaggaggtaaaccgactcaaccctagatgtgtgtgcaccatccagcacggcagccacagtaggggtcggcacgtggcagggggaccacgcgcaccgcactggagctgatgctgcagtggtgttggtgagggctcacactgtgtctgtcagccttagtgctctgctgggaatgtcccacctaagaagctgggtggccaggacatgggagacaaggagactgcagtggctgacagtgcagctgctagaaaaagaactctgtggaggtgtctgcagtaggcagatagcccaaggccctggggtctccgcggctgtgcagcactagcctacagtgaggctggcaggggagcagtccctaaacccacactccctgcaggcttgcccccccccccaagccttccttctctcatctctccatatttgccaggttgcttggccaaggtgccttgcccacagcctttgctgtatgctttccctcctggctggcagtcgtccgcagaatcttctaatccagggggagcatcctgcgttttctctctctggcaggattgcaccgcactgtggcttctgttacccgcatcagggagtgtgtgtgtgtgtctgtgtgtgtgtgtgtgtgtctgtgtgtgtgtgtgtgtctgtgtgtgtgtgtgtgtgtgtgtgtgtgtgtgtgtatacgcgtagttgtattttacacgtattactctcttaaaggtcttctgcagttagcaggctgctctgggctttagagccataagtatacacgctgctacacaggtatcacatctcatttgtccagtgtttacctggttgagatggttgttgttgttgttgttgagctttctgggtcataggaaagctcacagactctcaaaggctgtaacaaacctgtgcatcccccaccaccagtttgggatatattttactataacctgtaatctctgtgttgttataaacaagaaattcacttggatagggtaggtgtttgtttcaactggactagaggggtaccactctcaagatgtactgaggggcctggggaactgtggtgggcttatataaaaataaataagctatcacattacaatgcatatttcctttccattttaacaaatgataaactgagatgcataccaaggagacaattgatagtaattttctatatgaattattatacaaggcttgatttatatacttgttttttatacttctgtagataccaagcatagcatcaaagatcctggctgagtctggggttatggttggaaaggaagccttgttctgaggctcacagggccacagagtagcaggcatggcggttcctaaagttgtctgtggggagtagtgctttctagacctacatggcctcctcctgcgagggttctatccatactgaaggataaagcctgcactgggacagctcttatgggcactcaggactccctctgcagagcagcctgctcatctctgtaggctgagcagcttggcatcacactctcttataaactgtgcaaccttgggcttcagtttcaaagttgccaaaataggaaaactgaaacgcactgcttcaggtattttaatctataagtactccatcagcacccccttctgtctgtcttcaaggctgtccctggccagcccagcctctcctctctctctcnnnnnnnnnnnnnnnnnnnnnnnnnnnnnnnnnnnnnnnnnnnnnnnnnnnnnnnnnnnnnnnnnnnnnnnnnnnnnnnnnnnnnnnnnnnnnnnnnnnnnnnnnnnnnnnnnnnnnnnnnnnnnnnnnnnnnnnnnnnnnnnnnnnnnnnnnnnnnnnnnnnnnnnnnnnnnnnnnnnnnnnnnnnnnnnnnnnnnnnnnnnnnnnnnnnnnnnnnnnnnnnnnnnnnnnnnnnnnnnnnnnnnnnnnnnnnnnnnnnnnnnnnnnnnnnnnnnnnnnnnnnnnnnnnnnnnnnnnnnnnnnnnnnnnnnnnnnnnnnnnnnnnnnnnnnnnnnnnnnnnnnnnnnnnnnnnnnnnnnnnnnnnnnnnnnnnnnnnnnnnnnnnnnnnnnnaacaacattccacatgcatgtgttctgtctagcttatcacaggatctcgacagagtgatactttttaaaagctgaagccatttgaggcagctgattagcatgttaagtgaactttgtttattcagatctgaaagataagggatcttggacttctctctgcttctttctccctctccctcatcaccagcatcttcaagacaatgtcacattttgcgttctctccttcctcagattatctttgatgttttcacctcggtctcaaccacactcccctctgggtacattccatgacacccatgtctcatcccttactgtatacatgcttaattcatgttccgaatattcatttcccgtgacttagtttccacttcaaagagttttggtttgctctttttaaaatctgtccctgaccccctgcaaatactgcttttgttcctcttctcacatccccaatccatctcatttccacaggagtcttaaacatgcttcttgtatggtccgtggccttacatcttatgtgaagtcctgagtacttcttgtggttgcttggtacctttcccactagttgtccaaagaggttgctctgtaacctgtatcttagggtgtggcatggtgaggtggttggccttcattattatcttgccataatttagaatcatctaggaagaaagtctctgtgggaaattagattaggttgccctgcaggcctacttgggaggcattattgtgattgtgttcattgatgctggaagacccagatctctctgggtggcaccattccctaggcaggggatcatggactgtataaatgtagagtgtgagccatgcacaaacactcatatgtgcatttatttctctctgctcaaggctgtgtgtgagatgcaactaactgcttcagttcctgcctttgtttcccccaatgatggatagcaatgtggggttgggagctgatactttctcccctaagttgctttaggttgggacatttttatcacagcaacagttaggaagccaggacacatgatgtttcaaagttcttggctggggacctgcaagttttccatttgttggtcagtcctccaaaccatttttatgtcaaccttcagcttagaatccctagcatgccacttacgtttgaatacctagagacaggagagggccacctgtcatcttgacttctctgaggcagatgttgacctagccatcaggatctacctcagaggagtgtgtctgctgtctgtctgggtaccacaggtagatgatttacagagcactgaggttcaggacctcagtccttcgcaagggcagcaatagctcttccccaacatggccacttgaaacagaacctcaggatagaagtcgaataagaagatcacttacagccaggcatggtggcacacacctttaatcccagcactcacacattggatagcggaggcagaggcaggcggatttctgagttcgaggccagcctggtctgagttccaggacagcagagtgagttccaggacagccagggctacacagagaaaccctgtctcaaaaaaaaacaaaaaaaaaaaaaaaaagaagaggaggaggaggaggaggaggagggagaggaagagggagagggagaggaagaggaagaggaagaggaagaggaagaggaagaatcatcttttttattttcttaattataaattctaagtggataacactcttggatggtttttaactggtctgggctgcctattaattctgaatgtctgtgagtctctgggtgtgcttgattattactggctaacaagaagttatgcctcaagtaagtgtcctatattagctcaagaaatacacctcactaaatttcatcccagcagcatttagcatttgacaaattctaacatgtcatgagacatcactagaaatgtcatgttcatgagaaataacgtgcttacaatgtctacagaagcccccagggaggcaccacccttggtttcattacctgccctaagcgacccatcccatgtgcgatttgcatagcatctgtgtgccacacccaggacagactgctctgtcccaagcacgctttgtcggctcacctgttcaaacactctgtggtaaacagagcagcacacaccgatgcctgactctttttctcaacccaccctcgaggtgttctcctagtcgtctcttgtcagttcagtaaaagagtgcttctgttttcccagtacactctagccatgaaacggcctcctgtgaacttaaacttggtcaattaacaatagagtgggaccatggcaaacagcagagaaggcattgggtggctgagatgtgtgagtgccattgatggagaaattaacacggcctcctgtgaacttaaacttggtcaattaacaatagagtgggaccatggcaaacagcagagaaggcattgggtggctgagatgtgtgagtgccattgatggagaaattaactaggaagcttcagtgctaattaaatccagaattacagaggattaagaaacagaataagaaactcaacctctgagctaggagagacaacacctctgagcttctgactcctgcttccgtagccctagacatccccctcttttctgacataagggctatggctgcttgtctgccctgagatgaacactacaaacagcttgcaaggcgctgggtgactgaggaatggatggacaggactccaggatcacagagaagtcttcagttgagccccgtgtctcaggatttgttcaggaatcagcccatgtttcagagaatggttcagaaactactctttctgattatccttcccaagagggtccatctgtaggatattgtactcaacttgagctcccacacattaatctctattatttaaacttaactgcacaaggcttggtgtgtgtgcctcccagggctgagggatctgacaaggcctgccctgggtgaatgacggggtggagtctacagaatccgaatccctgaagggaattggatagcggaggccatgctcagtggtgggagatgaggcctgggatggatccacagtgacactcagccctctctctggcttctcaggaacatgtcctctcgatgtggccaaacaccatgaaaaggcacagccagcacccggaaatagacacacacctcagctgtttccaagcagagtcttctccaggcatggattcagttgagagatgcatcctctcgatggtggtgctaagataactatgaagttcaaattatcttgaaatttacatgccatatggtgttactttggttacagcaaatatatcctctttaattcaaagcaaagtgattttattttgctcgattgactgaattttattaaatacgtagaagccgatttagttttgcgatcatacaatgagctatttttgtggattccttggcacaaatatagcccattgtgagtttgtactaaatgcagcccaacacttgcatagagcctgcaggaccacaggtccgccttccccagtcttcccaaccccacccccaccccaggcctactcagcaggtgaatcaatgaactcttttgattggagatgcatttttcaatcttttccttattgtttcaagtggtaactctattatctggctatttttactctggtttgtgtaatacaattattacaaagaatacatttgctcaaagcacttgcatgaatctaagttcacttcctgtaaacagggttttttggtttttttttttttttttttttcctccccctagtgctgaaaactctctgggcttgcaaagccttttgagaatgtgactggcaagacaatgcatttgcagacctgagagtatctaacgcatccccgactgaaatgcacttagcttttgtttaagctggtctcatctgaacatgtcccagcatatcagagtctaaacaaaccaagaaacactttaaatattggtatgccctctcagactttaataatcactgctatctaatacataatgcatctccatagtatgcaagtgaattattctatgcctgtctcaggccttctaccttggctctcctttcctgcgacctgcttgctctgtatggacagttatgcgtttcactcacctttgggtccccaggaatcacagctcttggtccatacagaagcaatttctgttgccttaactgccgccttatacattttaatcggcagtgtgtatcaaaaacatgggatggtgcctccgatgaactttccagttttcagcttttctatgtaggtcttctactcccttgagaatcgtagactacaagccttacctgtattctgcacagatcatcttctctttgttttaaagtctccgtgttatttagtgatggggtaggacaccctgctttgcacgtggttcactggcacaggatgcttggctgatcaacattcagtatctctaggttgagtggataatttgatgaatactcacatgatgtgatcatatgcccatttacagcatggggggctgtcgggatgggcgttcagatgcaaacacaaacgatgtggtgcatggtgcctgtgcaaacactgcgcttcgaggaggagctgatggtccagggttaaatgccacttttgacagctgttgagtacaggtctgtcagagtggcatggatctgagtagtgtgtattaaatgagaaataacaccagcacccatcattaagctttaacgttctgatctagttcatcacgagaggaaacagtcagtgtcctgttaacacagcatcagcagcattgtgtgtgcgtgtgttgtgtgtgctgtatgtatgtgtgttgtgtgtgttttatgtgtgtgttgtgtgtatgttgtgtgtgttatgtgtggtgtgtgtgtgtatgatgtgtgtgttttgttatatgtgttgtgtatctctttgctgtatgtgtgttgtgtgcatgtgtgtgttgtatgtgtgtatgtgttgtgtatgcatgtgttgtgtgtgttgtatgcatgtattgtgtgtgttttgtagtgttgtgtgagtgcgttgttgtattgtgctgtgtgagtatgtgcgtgttgtgtgcatgtgtgctgtgtgtgtgtgttgtgtatatgttatgtgtgtggtgtgtatggcatactcttgtatacatgttcatgtatgtgtgcacacatgtatagaagccaaagtccatgtcaaatattgtcttttattgctcctagcctttttattgagtcagggtctctcaatgaatctagagcttagcctttgtccagactgtgagctacaaggattctcctatctttgcctccctggtattagggttacaggtacttggttccacatctagacttctgctgggcaccggggaccctaactcaattcctcatgattgaatagcaagtactttatcaactgggccattgcaccatccacccccactgcccatcactgggtttcagaatgccttgcactgcctggtttcctgaagtggacgttttgtcttatgtggttaagtgtctggttgataacacagagcagagaggtacatgtgagcaagaagatttcccataaggagaaaggttggagttgtgaaggacattcaaggcagtaggaataatgagtgctagcaaatctgctgaccagagtcctgagataggttaattcagaatggagcataatgtgcacttcaccatgcctgctatctaccaaacttggtttctatgatgtccccctctcaaataccacatccggatacttttctttgaacaaggttgtagcaggaattctcatccaataccctcctcctttgtccaagacagaatttctctgtgtagctttgacaatcctggaattctccatgtagactaggctggtctcaaacgttgagacccacctatcaatgctgagattaaaggaatgagccaccatgcccacctcccatccaacttactcctaagccccaaggacattgcctcttggtgtccaggagggaacggaagcagaatgggacatttctacctggatttgaaaactgaactttgttgttcatttgtgactgtgagttgttgtcttcgtgaaagtcgatgaaagtttgctggtttgtaaagcatcgttggtttgaggctttagctgtagatcatggtgagatgagtaagaagatgatagcaaaaggcaccatgggactggggagatgtctccagagtccagaggtccaagaatctactcaagtttatcactaaggaaacatttgatgttccacacttaaagactgaagatgattttgacatttaatgtgcacctgagtttagtcacaaattttgctcattattttgttaacgttttaatggctgtgattgacaaagaagattatcaaataacatcctaaagaagagcgacctggcactcaatctgtaattctaaatgcccattgccatgctcccctctgctcccctctccttccccctccccttccttcccctcccctgttctctagtctgtcctaaggtagaagtccttctcacctgaaagctcactctatgtccagagacaaattattgggagtgttctttgttattaaggtgtccttcatcattctatgagggcattttgtgaatgtaggcgggaatatagctgagtgggtctaaacatcttagaacaaagaaagcaatatgttactagcttcaccctggacttgtagtcccctcagtgagctttggtttaaactttcttggcactgctttcatttcaaaagtggttatcataacgtgacatgtgaatgtcattgtagagggaatgtgtttgtgttgaaaatacgtagctcacaaataatcacatgaggaagtcaaatgggtatatttgattacaaaaaaaaaaaattaaaaaaaccaacaacactgcgaaagaagagccagaaggcattgcattacagaacaggaagtcccaagctaaatccctcccgcctatctctcccctcagggtcacagcagagatgtgggtgggtgtgttagggccatgaaggaaagcacacgtggatgggagtgtgtacgattatgacactcatgccccaggggatgaccccacactcatgtgcatatgggaaagactaatcaaattcaatggtttagtatgagggagttaggaaagaagggagggagggagggagggggagaataaagtcaggagggatagatgttggaggcaaagggagagttgcagagaggatgtagcttatgaaatttttatttaaaagaaaataaaatagtgtttgcctcaagtcatccttttggtgactgagttaccctaggaaggctctgcctccatcactcttgctgcagttttgtggtgtatacaggcacccacctctcctcacagacagagccttctgccagtagaggaagacttgatattaaccagaaaaagctttgttcctttatctggatggatacggcctatagtaatattagacattaattatataatatataatcatacataaatatatattatatttacatatatcttatatacataaaatatttagttatacatttatatgatacataagtatatataacataatatataaatatataattcttaatttagtatatataattatgtattatacaattatataataatattatatatacatatgtgtgtgtgtgtgtgtgtgtgtgtgtatggggtttatttgaatagcttaacagctgtggtccagataattcaacaatagctgggtgtgagcagaaagtccaagaatctagctgatcttccatatatgctggaatgccagtgaagtttccaatgccagcgaaggaatagatatgggcacaaggcaagggcaagaaggcaaagagcaaaagcttccttcttctttgtccttatatactatataatataatataaacctatataataagtatataggcttccagcagaaggtgtaaccctgattacaaaggagaagtatgtagcctttaaatgacgttctccagccttttggggaaagtagcatctagaccgttctcctgacccacccaccagtcttgaaatataaaggctttcagcaaggggctagctttaatattctgatgtggacaatgaatggttatgcaccaggctatacgtgagttttaaaggaagatgacaatgtggattgttcctgccacaagagtgtgggtgtcactcgtgagtgatacagaagacactgaaccctgagtgggaaggttagagctctggggactgtgcagcctttgagttaagctagagaccacgagtctgttccagacatgttcactgacggtgcatggagctgctgtgatgggttggtgagatgaagtctgccaagcgctgaggtaaaaactacagggaaatccaagcctgaacccttaaagttaacagaatctgcagaggtcactgtcatgtagcacacatgaaaggtgaaactgtggcagaagaccctccacagtgcaagactatctcagaaagtccctacagtgttgggatcagtcgttgacttggctgttgtcggttgttgtcagcggttgactgatcccctaccccgcccccgcctgcccaggaaaccctcacgtatgtgggaagcacagtcgtcccccagtcactgtgaggcagaagtgggagctttctgttgagcatggttccccgaatgttcactccgcatctagagtaagagtaaattggggattaagtgttccttagagtcaagtctccctggagatactcagttttgatactttcccaggcatgctttctgatatttctgtgactttgtgggtggtctcatgatgagagatgtcaacaggaaaattactacctttaataaataaaatataaacatgtaattttttatccccagctagctcatgatgaggcacagtctgctgggaattatgaaatacctttattgtctatcattctggatactacagcaaagccaagggtccttcaattttggatagaaacgttatgctcatgctcatttggctgattgttttcttgagacatgatctcatgtagtccgggctagactctcacaccttagttaccctaggctagacttgaagtcctgaatgttctgtctcagttccaaagcactgggattctaagtatgtgctgccacaccctgatgtttgttgtttatacttatttcttataaactgaatgttgacccacaacctgtatgcacaaggtaaatgctccatcactagactacagcctaggccttttctttactttatgtttttttattttaaggcagagtgtcattaagttgtccagattcactttgtaccagctgcatagtgcaacccaaaatcctcctgtcacttcctcttggtgtcacatgatgcaggcatgtaagggtgccaccttacctggattattgtctgtctatgtgtctgtctgtccataatctatgtgtaacatctattatctacctatagtctatcatgtgtcattgatctattatcttttccttctatttatagcttgtatattactcttttatcattcatctgtctgccaaccatttatcatctgtctctatgtatctatctatccatccatcatgtttatctatgtatgtatctatatatctattatctattatctatctacatatctacatatctatgtacctagcatctatctatgtatctaactatcctctctatatatccatcacctaactatttatcatctatctatgtatctatcatctattatatatttaaatatctgtcatctattatctatgtacctagcatctatctatgtatctaactatcctctctatatatccatcacctatctatttatcatttatctatgtatctatcatctattatctatttaaatatctgtcatctattatctatgtatctacatatctatgtatctagcatctattactatctatctatgtttctatcatcttttatctatctttttaaatatctatcatctattatctatgtatctacctatctgtatctagcatctattatttatgtatctatcatctatcatccacctctgtattaatctacgtatgtatgtatgtatgtatgtatgtatgtatgtatctatctatctatctacctagctatcatctatctgtctatctgtctgtctgtctgtttgtctgtctttccacctacctacctttctcaatccccccatctccttctcacacaccttgctggcattttttttttttttttggttttttgagacagggtttctctgtgtagccctggctgtcttggaactcactctgtagaccaggctggcctcgaactcagaaactgctggcatcttcatgaatgtataggatgcgcactgaccttatcctctcactgccctcctttactcgtttataattttacacttcctgtcatgggtaatatctatgaagacaagatggcctcatgacttatagtgagctctattatgagctcattcactcacgtgacttcagggttctgcacagggaaggtttcctgttctcttctctagtcgattttgagttccagcttcttgttttaatcatgttttattaagttatttatttactttacatcaacattgcagcttcccctccccctctcctcccagcacactcccacatccccacgtccaccatgcttcccttttccttagaaaatgggaggcattccatggatatcgccagccttggcgtatcaagctgtagtaagattgagtgcatcttcttctgttgaggctaaccgagttccagcttctcatagctgttatttctctggctgtggcttaaaccttaacagtttattttaaatatggcatgattgatacaaatatgaagctttttcccaaaagatacccccttaataatgttccccggtggatggaccctatgtatcaccccaaggacactgacaccagacacaaagcattttaactgcttcctctcagcccagaccctcccatgcccagcccagtccaccatctctgcctgtccttccatggccagccttaacctgacttctgtctgcatctagacttccccttgtcttagccaggtttctattcctgcacaaaacatgatgaccaagaagcacattgtggaggaaagggtttattcagcttacacccccacattgctgttcatcactaaagaaagtcaggactggaactcaagcaggtcagaaacttggaggcaggagctgatgcagagaccgtggagggatgttacttactggcttgcttacgccggcttgctcagcttgctttcttatagaacccaagactaccagcccagggatggcaccacacacatttggccctcccacccttgatcactaattgagaaaatgccttacagctggatctcatggaggcatttcctcaagagaggctcctttctctgtgataactcaagcttgtgccaagttgacacacaaaaccagccagtacactccttcttcagtcacttcatctcatgaacacccctcttctgcttctaccctcctaggggttctctcctcttgctgaatatgagccccagctccccctcctgccttggcaatcttagttttgctcaccctagattcccattttgctcacttgtgtatcttgtgcacaccatgtgtgagcaatcttgtgccacttcatacgtgtttctgcaagttcctgggacgtgggcgttatttgcaaactaggcccattcttacttagccactggctctcctgagggagcctcgctcctccacagcgttccctcctggtgcctacctgcttcctccacacttagaagcaccgttcacccacactcgggtcatttgctctgcttgcacactatgctgttgccagctctccccttgtctgtgacttgggtacctaacctgctcctgattagtttcctagaggagccctttgtccttgtggttggtgtcctcagctttttggtatgcctgcatttggtaatcggcgcttcggtgtttgcaaagcaaagggaatcaatcagcaaccttaaaattaaatgctactggcaagcagggataatacattagtatacattaagcatctttcatgcaaatgtgacttgcaaggcctgtttcgacacctgccagcttcctatatgaagttcacagcacgctgatgaccgtctcccctcacggagaagggttcagatgaggtgagtcccgtgtctgcagtgtgatgatattctggtattagaataactgtctactttccggagacatcatgtgctcctgagtcgctttgtaaacacctgggaacacagtgtccaggtgatttccactatgacagagatcaggtaccaatgaggtaaccttttaccaccagcatttgactccaagccaagtcataacaccacgtatttatcctaacaggtatgtgagccaaggcatgcgggaagatgtgtctacagcagagcattctctgaacaaggagagacttgcagctctgaaacatgctctgaatgtaattggcttcagcaccttggtgagtccccttatcagggcttcacacggaaagccagccgctaccagtttatagactcacttctcccaaaccgtttcctgaacctcagtgtagcccaagggttgctgccagctctgacaatgtttcagcagagaacgtggtctatatggcctcctggtgctgactgtccagcctgggcaggagacaagggagcaggatgaatgggtggtagatccctggaaggcagagatacacggatacagtaacaaggcattgatgttatctcatttgtttgcctatttctttcttctttcttcttcttcttcttcttcttcttcttcttcttcttcttcttcttcttcttcttctccttcttcttcttcttcctctctctctctctctctctctctcttcctttctttaatatatatgggagttgtgcttgcacatagtgcctgtggatgacagaagaaggtattgggtcccttggaactggagttacatacagtttataagctaccttgtggatactgggaatcaaacccaggtcttctccaagagcacccccactccaaaatactgagcccgctctccagaaccatcattttcaatagaaatataagaaaaaaaaaacctttcacatacatatttagaataaaccagataactgtgttgtctgaaccatgagaaaactggctaagctgaagaaaccatactgttaaaatggtcaccctgcaaactaacataatcactttacttaagtatcttctctagcaggctagagcaggcagggaaatttctagccctctgctgtgccagagcaatttcaaagataacagagaggcctgtggtcaagccaggctgcctaggacttatagtctgctctggatactgggcacttgtcatgtgacaaaggaggctaaagaaatgaactttttgtttgtttgtttatttgtttgtttgtttgtttgttttctgggtttttttggggagggttgtttgttttgttttgtgtttttcgagacagggttctctgtatagctctggctgtcctggaactcactttgtaaaacaggctggcctcgaactcagaaatccacctgcctctgcctcccaagtgctgggattaaaggcgtgcaccaccactgcccggctttgtcatgtgacaaaggaggctaaagaaatgaactttttgtttgtttgtttatttgtttgtttgtttgcttttttgtatcttaaaatattaatttgaatttaaatagccatgtggttagggattattgctctgaatgggtctggtcctgagaattagacatgaatggttaggcccctgaggatgttcttggacgtcatttctgttttcctgatgtggtatctcttctccctcaatatggaagtaatgtagattgggccaaatcctcagggacaatgagcaagaggtcactggggaccccagcgagccccgcagctccatcccagatgtagtctgaagtatgagctccttctccttccttagaagtgtgtgtgtcatgcttgcccacagtcttgggcaacgggggctggaggaagcataaaagacaattgataaatggctcaccctaagtggattcactgagacactttgttcaaacaggccccacacctttaagagcatggagttccacagtgagaggcagtctgatgatgtcttgttcttttgaccctggttattcaatttctacatgtctgtctttttctggccctgcccacttgcatgctctgtattagcgctggcttccgtgatgtctcttttcttatcctcactccccaacctggagtttctagatcctgtagggaacaggaacacagacaggggcagggcaccattttaccaaaatatcatccacttggaaacgcctttcaagttccacaattgatcctcaaaggcaggacaggcaaaacacacctgctgactggcatagctgatggagacggcagtgcatttacacaaacggcctgatgtccatcccttcatcgtaagcctttgaagcaatgtgaagaacaaaatctgttccactttggagtggtggccttagtccatgacaattcaaaggatagtatttctggccgataaggccttcagagcaaaatctgcaagggcttgtgtttcttagagcaaaacctgcaagggcttgtggttctttgagactactttgcagagaagcctccatctctgcaccaaccatatccagtagcaggcaagctgacaaggcagggggacaccactgcaccactacagacaaaagcgggaccccagaactcctcctccttccatggggagttttcctctgattcagtttcactgcattatatcgtgggttatagtgaacactcaaagctctgtcttcctcactgaataaatcataccccccccccccgagaacagcacaggccctccttgcctgtgtagaggtgactaccttgcagagtccagtgggaaatgctgccttctgttaattatggaatgctatacctaagaattgcttgagatcagtacctccaggtgcttactttataaatgggaaagtggcaattcccagcttcaggtcccactcttccctcagttccaggcttccagaccaggccctcctctcctgttccctgcacccatgtgcaagaacagcttgggacagtggggtgtttcctgcaagtgattggactacaatcactatttatatatatatataataatgattatccagaacacactgattcataccagaacagcaatttagggcaacgcacatggagctgagatttgattttgagcagtttcttgaatctcccactgtgggtctgaagagtggcaagcccaaccccaccagaatgctcccggttgcttggagctcccacctctgaattattctatctgttctctgtaaacacttaggaggtggaaaacctattcgttatcctatcggcgatactacacatcggagacattcagttcactgcactaacagaagctgactcggcctttgtctctgacctccagcttctggaacaaggtcagtggagcaccaccaccttgatggcaaagtcgttgggggtgcagtttcacagttttgccagcagatggcgacacagcacagaatccggctggctgcaacaatcactagctggtctgaagtcttggggggaggggagaacctctttcttttctcgaaagggggtggttgacaaacgtgctttcgtggtcccattctgcacaggggtatcatcatatactttagatcatttgatattattagaatattctttgccccaacctgctgtccacacagtatttggagaggagtcgttagctaaacattataaactcacaattactttcctttaaacaccatgttcaaaagcccctcttgtttgatattgttttcatggtcacatctagttttaaaaaaatatcctcaaaccacgggcttccaataaatggcctattttcacctgtttcaaagttattttaataaggaatttggaaaaaaataatccagccctatctacaagggtggtgaaggggaaaatatgtccttactaaatccagacagacacaagatcccaccagtgtctggagtactaaggcatttctctagatgagtttaagccagagagtagaagttgctctccttctaacatgaagtatgcacacaatggacacaaatcgcagtgttcttagtgttgaaatgcatggtgctttcttatttacagctgtgtttgatttcagtggcaggtatgttgcaagtgtcgaccgacgagctggcatccgccctaacaactgatattcagtattttaaaggtaagtccttgtgcaacctgacttttacctttgtacagtccctgggcttctttgaaatggggaaattaaacacagccttgcctgtctccacacgggggaaactgtttgcatggactgagtgccaggagaaagcactgaaaggctgctgtatgggaaccctgccatgctcccgggagatcattctgagtaactagcccccttcctaatcaacctgtcagttcagaaaaacaaagccatcaatctaagaggatgtattctcataaaacatggatcttcatgggggaggggtgcggccttctctctgcctttccccgctcagaatgggggctgtcatttatttggtgtttatgagggaatggcatggagccaaatggtccgaagtttgtcatttctgatctcaagaatggtcaggaggcgggcataactattactctcctcagggaggaaagtagtcagattaaaaggggttaatcaccagagatgccaagccactggtaaagaagctgtctaccttcacagggcggcttcagccctctgtgtatgcctactccctgtggcacccactggtgcaaggccgtgctccgtgcacaggagactagcactcctgcatgtgcttcagctatccactgaaatgtcaggatggatgcccttcttcaaccttcctcttcatagctgtgagggctggcctccccgggcactctatgtcgaacttaccagctgcttcgtgggtctggcttgcagggattttgatgcttggctaatgacccctactgcttagaatccccccttccatgctaatcaacatactgagttttcccatgatccatccagctgttccccaggttctgctggctccccttacccctcacccttctctaccaagtaggttgggtccctctgacctctcaaagagcttccctcctcacagccctccatttcctgtccagcatcacagcagcagcttctgttggtgttttctttcctctggaagtcgctcacctccacgggaatgaaatggaagtgtgcttctcacctgcgcgcaacagtctttccaagacaccacttttcttagagaatgctcctccctataggacagacttccaggcccccttagccattcttagccatgtctccatctacgtctctgctcccacctatgtcaagtgcctggagttctcaagatgctgctggtctttctgaagacatgttcttagtcggggttctgttgctgtaacaaaacaccatgacccaaaagcaagccagggaggaaagggttaattgtgcctacacttctgagaaggaggtcaggacaggaactcaagagggtcaggagacttgagacaggagctgatacagaggccatagagggatgctgcttgctgtcttgcttcgaatggcttgctcaacctgctttcttagagaaactaggaccacagcccagggatgagaccaccatgggttgggtcctccccgaattgagcattatatgagaaaatgccttacagctggatctcatggaggcatttcgtcaactgagtctccttcttctccgatgactctagcttgtgtccagttgacacacaaaaccagccagtgcacatgttaaattccgctggtcactcaccatccggttccctcaacacatcccacccaacctcctctcaccacattgcccacccttcagagctcctcaaccacgtgaacccggaactttcgtggtgacatctggaaggctgcacttgtcccctgccttagtgggctttaccgcacccatggttttgaccgtgctctttcaatttagtgaagttctatcttgtctcagtggtggctcccctctctttcctttccctccagccaactgagggactctcccatccctgccatctgctcagccttaaggactgagacttaaggacacgccctgctggccaaggccacaggcgagcattcttgagcccggcattcacacactgtctcatccagcagtactgtactggatctgcctgcatcccaggtcaccctaactctctatcctgagtcccttcactggccttccattctggaacttctcctctctcaggattcccatggctccacttgagagtgacaggggcttcttcccgaaggccctgttttgtcccctggacccacaggcacattctgattgatttgaccattactctccagacaggcaagtgttcaaatgccctgggccagctcagtgcccaaccagtgagctattatccgaaagctcactcacaggaccctgagctagctctccaactgagaggaggtggctcagttgcagagaggtgcagaggtatgcgtagaagccttagtaagaagtcaaggtacacgacacttcagatgtcgataactgtcaggcaccacctttcggggccctttctggacatggcggacatcatagagtgtgagtgggacatagacagttgtgttggcttctaacaaggagaccattgtccacaattctcctcttcctttcactattccaggagatgtgataatacgtcgacacactatccagatggctgcgttttaccgcgacctcctggccaagtcactgtacagtcgtttgtttggctttctgataaacactgtgaattgctgcctccagaatcaagatgaatataaaaggtaggaacagtggatgcttgcatctatgtttcgatgtcacacataattcaggaggtctggacactgagcctttggttaccctgtcacagcccccctcagtagctgttaatgttgattgcaatgccacacacaactcaggattacaggtgctgggccctgggttatccagctgcatgcaattcaggtgctgtggatggtggcccaagtgttactctgctttagccccaccctggagagaggctttaccttacagcattgcccagggctggcttcattcatgcttcattttagcaagctaacctctctggaaggtatcagtaattatgctttagaactataagccccgccccaccttgccacccaccagcactgagggatgaatcaaactgtctctcatgcatagatatgcaaatgtgttctctctagaatgaaggtatagatgtggccttttgtgcacgagaagaatagaaatttcatgactctaggaacaagacagtctaagaatatctaaagctcaggggttggtgaaagcccacgtgtgtctctttcagagccagtttgatgatgtgtatgactctgccttgagattcctcacctgcttcacgcgttgtttgacaaagggtctctgtggtaatcctcttggctcatacccttaatcatctctaagcagtagcttttcagggctatttgatcacctaaaaattatagattcccctggcattttgtcaatgaaaacctccgttattattcttgttactggtaatgaccttgaagagacatctgaaagtaaaatcacactcagaagtcttcacaggcatgcttgactttgaatgaaactctgagaatttttctgctgtcctacagttctttaccaaatcccttggattaagccatttcttggaaaatattaaaattaacatcaattaatgggaaagttctgagataagcataggtatttcaggttttgaactaagggatgttaaagttctctaaatgtactgtgcaaaagtctcagcactcaacagtgcatgtgttcaacctcctgggacgttagggggacttctgtgcagaatctctcctctctctctctctctctctctctctctctctctctctctctctctctctctctctccagcctggctctctctggggttatgagggccctagctcttgcttctnnnnnnnnnnnnnnnnnnnntggttactagttggtctgtggtcctccatcttcccaacccttacccaccttacgatgcaataactaagagaaggagcttaagttacaaagggtttactctttttttaaaaaattggttattttatttatttacatttcaaatgttatcgcccttcctgatttctccttcaaaacccccctactccctacccatacccctggctccacaaggatgctcacccacctacccacccacgcccgcctcacagccctagcattcccctaccctgagtcatcgagcttttacaggaccaagggcctcccctcctattgatgccagatgggctatcctctgctacataggcaggtagagccatggaagggttttcttttgtttctgcgttggaagagatacagtctgccatggcagggaaggctgagggtcagagcagccaagcccagcgagtcagtgagccaggaggcagaggaaggggaataaccaggattgagtttgttcttcctttttactcttaacttggaccaggatgctggtccatggcaaggtactgtccacatgggggagggcactcttcccttacttcagtctcacaaacaacccaccagaggtgtgccacactaatacccccgtgcagttcttagtgccatcaagtcggcaataggaagatgtcagtctgtaagtgtgacaattattcacagctgctaccaatgtgctaaacttaccgaattaaccttgtagaaaaatagtagcatccttgatcacgtggacagtgatcaattcatgtttaattagcgcataagcccggagacttctagaaaatttccacttgacatttgaatcctgcagagtcttgaatttttatgattggaaacacttggataagttgaagagaggaagcgtggcttctattacagtgggtatcctgcctggtgtatcagaatgggaaggtggaaggcagccttcgcctttgaatgtctttgtggggggacatacctgaggaaagtattcatggagaacaagaaatgaatcataaattataggtatacactccacctcaaagagacagcatctcattggaattattaacatttttttcaagagctaccaaagttgggtttaaatgccctagcaatgaaatggaaacaacacctgtagtatttctaacacttggaaattctcagaatattcatatactaaaggtctgcttcttgattcagaaaggttggagatgttttcaaaaccttataataccttgtggtatttaccagtcgtcatttattctaaagtgttacaatttcatggacaatgataagtttacaactctggtaactgagtgggtgaagttggcaagcacactgaagtagtgggatattgccccattcggttttattgtgaacatttcaagggagaatagatgctggtcagctgtacgttgagggacggtggaaggagcgagcgaggtcaaggcggatctgatatcctctctgggaaagaccacctcatttcagaacataaaatggatctaatatgaaaacgtctcttcttgattctgtgaagacattcccgatgaagccttgtggtgtcaggcaggggactgttcatgatgagttagttaagaggaacaaactgtccccacacttgcctggacaagccagtctggaagattaatgtgagctcttctggtctcctgtttgttgtgaccttgacatctgtgtggctctctcgggacgccttaggctgtggttgaggcaggtcggacatgaagcacatgggagcggtgctaagctaagttcaaggtgacctgacgcactgaggaagggaaagccaacaacagaagcagtgagagcatggaaaccactaaccaccatgcttcatgttttcttacatttctgtcgttcccaaagtgtgtgtccacacgtgccttttggggtaaaatcctgttaaatagctaaaaactaaaaccagatattttattgttaaatgagcaagaactgaggtgaaacaggagctctccaaagtctttctcatggcgcatgcctttaatcccagcactcgggaggcaggggcaggcgggtttctgagttggaggccagcctggtctacagagtcagttccaggacagccaggactacacagagaaatcatgtctcgaaaaaaaaaaaaaaaaaagaaaaaagaaaaaaaaagaaaaaaaagaaaagaaaagaaaaaaaacacattttaaaaccagttttcagatgttaatcacttctgggggcatttctttttctaagctataatttctgggcagcgagaggagtagatgacggtgtcgctgctaaaagctggcgtaacctacagcactgtggacacaatctgctttcaggaccaccccttgctccccagcctcctgtgaaagagtcagaccctccctgtggtcccctgcttcacctctgtcaacctcacctctggttcactgctggtggtaccctgcttctagggatactgttgtccttcttagcttgggatcagccacgcaatgaggcaagaggagtcagaataacaagttatgtgttagagctcacatctggtgtgtccaccaggtccctagctcctgacatgagcagtggccagctcctgctctaatagagcccaggaaagaacagctaagggcagtttcagcctgtttcttagccaaattctgttcttatcaaacaccagaatatcagtatattaatatatttgctcacaccccctcccagtttccaatgggagacagacagcagagctgcagtgcctgggagacatgtgtgtggtggactgtctgtggaaggaggcctgggactccataacgccttcagaagacacatgagtgtcgtgtagagtccttagacccaggagataagtctccagctgatagagatcttggagatcctatttttatggatctcacctttatttttctgttttaaaatcatgcagccaaacatggatgactgctggaggtatagaaaaatgcccccacagttcgttagtctcttagttacttctctatagctgtgttgaccagctatagagaagctgaccaggacaacttataaaagaaattatttatcctagcttacagttccagagggtgaatccacagatcgtatggcaggcatcaggcaggcagcacagagccatagatgagagctcacgttttgagacacaatcagggaacagagagagctaactgggaatggcacaggtttttgaagcctcaactagtggcacgctccctccaacagagccacaccccctccaacagggccacacctcctaatccttcctaagcagtctaccaactggagaccaagtgttccaacatacaagactgtgggcctaccatctgcttttatggaggcaactcctcggttgcggttccctcctctcggatggcaagctgtcgaggtggcataaaggtagctagcacaggccctgagcagggtgtcccatagccctggtgggtatcagtggtgtgtgcaccacagagacaggtatgggtgcttctctgcccctgggaatggtgagactcaaggacagaaaggctcaagctgtgcagtgtcaaatgacaagggctttctccaggaggcctgaggtcaccacctcatcttctcatctcccctatgtgctgaagttgattgctggatagagaagcctggtgaagtaacacctgtggcatttctcaagctattcggcctcccttctattgaccactatacgtatttgaagacatggttgtttgaccacgttcgactgttatagagagatgccatggccaagggaacttataagagaaggcatctaattgggaggttgctagtggtttcagaaggtgagtctgtgatcaccatgacgaggcagcatggtggtatgcaggcatggtgctggagcagtgactgagagtttacatcagagacagacagacagacagacagacagacagactagcatgggcttttaaaaactcaaaacccacctccaacaaggccatacctattccaacaaggtcacacttcctggtcactcctgaaccgttccactgagatccacccttgagtctttggggctctcctcattcaaaccaccactccacgtgatgactcaatcgcttcccttccctctctaactttcattccactacagttggcatttgatatgtgttatagttaaaggaaacactatctagatttcgttaataaatacagaaacaggaaactgtaaattgtagagagcctatgtgtctaagaatgaggtgggatcatcattttacaataaacgctgaccgctctcctcctaacgcttccctgagagttgacaatgaaactttaaactctaagagtcccagcttctaaagttacccccagaaaagcgtgaggcagatgaaagactgcaggaaatacacagtaaaaatccagaagcaagcacgagttttagagagacggtttatacattctttgttaatccttctgaaagtacttaattcttaataaatggatttatgttattaatttttaaatgcctcataaaagataataaaatggtggtggtgcctttgctgggagatggaggtagtctccctcagcatttctttctccatctaatgagtaatatcattactaaaatgaatagcttttggtacacctcccttctcaatggccagcttttatcctttgctaggaaagattgaaaaatccaaagaaagtaacatggatgcatatgtccacctgcagccgcaagttagcatgagtaacacttggtgttgcatttttaatgggactgaagggacagacacttagagctgaaagcataggtcctttttgtttcctagcaaagtagaactgactcaggccttcccagcatccctttggctcctcaactgtttcttccataaaagctgcataggaacaggcacagaagaggagcacacaagcaccagcccgaagtgtattttctgccctgtgtttttaaacttcatgttggctttgatacttaaccacggtagcccatcaagagtagtctcgctgctgcttctacttgttgaataattcccatggatgtggaaacctcacctgcagacgactgctaagtctctttccacgtttctccccattgccagctgcatccttgtgtgcagcttcggtgcccgctcaggatcccactgggcggggccttcgtggcatgactgcagtcagagcatgactctgcatttccagcaagcgcaagtgacagctgtacactgcggccccgagagtgtcgcagatgtaaggcatgttttagtcttatttcagacgtatcgtagcttgtcctctcttggtacaagggtgttttacattttccctaaaactgagattttcagcactttgtaagtattattttgtatagagggtctggaacaattttctatttgattcgagcactcggggatccctgctctatttattagtatccttgctcagtcgccctgggtctcaacctgactgaaatcacacaaataacactgtttaacaagttggttctttttagtggtttccagtgttttggtgatctttattcttccgtacatcctgtattaattttgattttcatgagacgttcttttaggataccagccagagcacatccacaaatgactgtgggggagcctgtccctctggggcaagcttcggcattgcagcatttgtccgggctctttcacacagtcagcaatgcccgctgctttctcctcagctcactgagtgtccctcgctccctggttttctttttctggacgtttcgctccactcgatgtcaccaccatgaactcggttctgctctgtctcagtgactgagatgctgaacagggaactttccagggtgatcttctctgcagaaatcctaaatcccacctaggcttttcttatcagttctgatgagggggtttgctggaatagcttagggttatctaacagtcagagagtgcttgctccctctgtgccccctgcttctctcgatgctttattgcactgaccagcacttccaaatagttgggcgtgtctgatggtacatctttcttgtcttgtttccaaaatgatggcagtatggctgagacttgcccttatgcaacgtgtttacgtaacgttcccacagttatctgtcctgaggagctcttatgtttcatgtaagcttattaaagtctagtgggattatgacaaccatctcattccttgcttcagtgtgtctatttttaattaatatttaacttttaatatgagactttgttttttgtttgttttgttttccttttaagacaggatcccatagccctagctggcctggacctcaataagtgattcagactggcctcatatttacagggatccacctgcctctgcctctaatgctagggttaaggcatgcacaaccacacatgcaaagacataggcgttctatatttatgtcaattccaactcttctcacacaactcctgctgttttccctgctttctctctcaaattcatgacttctcctttaattactattgttacacacacacacacacacacacaggcatgcacaaatgcacacatataactcactaagtccattttttctttacaatattttagttgctttaaatgttttagtgttcaatatgtgtttgactctttgtgtgtatgtgaaccacacatatgtatgtttaccatatgtatataaatgtatattacatgtatgtatgtgtatgtaccacatgtatgtatgtgcaccatgtgtatgtatgttcatcacatgtgtgtatgtgtgccacatgtatgtgtgtgtgccacatgagtgcctgatggccaccgactgcaaaggagccatcagatcccatggagctgtagtgacaaatggttgtgagcccatgcaggtgctgtgatccaaagccagccctctacaatagcagacagtgctctcaacctctcagctctctgtttggctgttttatttctttccttgactcattctctcagcaagggctccatccctgctgtttggtttagctggtttttgttttcatgggtgaaatgggattctagttcttgcttttggtagatctcttggctgttagattcatactaatgagtatgagcggcagtctgtgttttagtcctctctccagtgttcctaatgccgtccaacagttagggaacagattgaatgtgactgcgtagttttatttattttttgagtcatgtatgattcccacaagcctacccatttcaaggccttacacttactctgtgtcatcggttacaggtgtgcctttatggtctttagtaagttcgtaactgaggtggaaatttgcacttcacatagtttgtgtcttggtctagctcaaaattagcctgtaagaattgtttctaaaaaagcatttttttttgttgttgttgtttgattgtcaagtctcacgttctttttgctgttttttagtttactgtgttcttatttttgctcattttgagaatttttcttttgttccctgagcttacaaactgaatgtttgtttggcgtttttaaatgattttcttttctctgggcctataaactaccctctaagtacctccgggttcattccataagttttctatgtgttttagttctaaatattttgtctttctgccatttaagagatgtaataacaagcagtttgtcagagaagtgaatctgacacaccatgtttctcttcattcaaattgagaattttcttttcattaaataaagagatttctctgattcttatgaatacagtacaagtgacttctatttctgggtagacttgtttaaatcattctgctgattaccatgacaacccaaactctgtaatctagcaaatatctgaagcaaaacctgttctctaaacaagcctctggctccagccactcctctcccaccgacacgtacggtgatttcttgaagagctggccatcttcctctgtagttgcatttcatggtcctgtgtgggcatttttagttccaaataggatgagcaggaggagtgcaaaggtttttcctctggtaccaaattcccctggtacattctaaaacccaaatgagatttgtcagaaccacatggaaaatagtggtaaaaatgcaatgtcctataaaaatcgccaaacaccttggacaaagtcatagctgaatttaaatattagtcataacacttgtgaatcgtcttcaagaatgatgtgaccggtataagtaatggaggcctgtctgctttggtcctgactcagtgttttcaggagattcaactgatctgtagagatgtgactgttgtaacatcaagtgtcatgagctttcttgtcaatgacggcatctagtctttgaaaataccgtctaaaaccagattgtttaaataaaacctctgagtgactagatgatttttatggcagataaacattctccatccttcttcctggctcttcttgaatggggaagtcagcacacatctttttttaaggacagaactctggaagctcctctcatctttgttcaaccacctcccagcgcctgtgacctgccctgctcagagaagttaatggaatctgttccttaactccccatgcctgtcagtggggcataatggaaattatgtcagaataaacaataccccagagggataaaaacggggaatacagtcggcaccctggcccttagagatcctgtctctgaacaaaaagccatgttatgctctgtgctgagccccagtgtcgggaggtccacacaggctatgtcagtaactagttaagtgcttttgcttcataaatgtttcttgactgaggagactgtatccagtaagggaaacctgctagagcgggttggaatcacagtaggaggttttcccacttccctggagacacaccaatctaagcctggcttcttcgggtatgcagctggatccatggtgagggggcactggctgtggttatcatatattaaacatgatgttaagttatgttaggaactagactgtcattctgtacactggcatggggcattggatcagtattattcttttctgtttttacataaatgtagacataggcttttgtaaatggtgggatttcacagcaacaaagagaaggatttgggatgtgacccctgatagatcttgttccaaaccatgcatttttctgatgtgcttcttctaaggaagagcatgagaaggattgggggggttgggggggggcagagggggcagggtcagctgccatgagcactagctagtcttccaaaagattcagatttgattcctatcacctatgtggtgacccacaactatctgtaacttcagttccagggaagccaaggctctcttctggcccctcttggcacaagatccccatgtagcatacaggcacacattcaagaaaaacattgaaaaagacaattttaaagataaaacaacagggtctggtgagggagaggtttgttttaaagttggaaaggtttagagtcgattctttttatgtcagtaatttctttacgctcagtgaaattaggattacagtaaagtttttccaaatgtgagccatgcctgaggtcaagtcggccctctgattctttacatctgggtatgcaggtgtctgcagctcttgctaaactgggggcttgggtgcatctgtgaacacattcagtgaactggcagaccagctagtgagtgacaggcagcctggctgaaagccacttgctcgcttgctcgctcgctcgctctgctgcattgcggtcccccggccccattcttattcttccctgcacctgtgcctccaagtgtggcttggatgctccctcagcactttgatccatcatcttacagagcctcgccatctaaaacctcctccaggtgataaagacctctgttttcgatacttacattaaactgtaaagatacccaggagctttctttaaaaacacacagtaaagctcaagcctcagggtgtggggcaggaaaatgctgatcaaaggtgcaagtctagcagagaggcacgcagggatgcagacgctaaatgtgaccactgttcttgccatggagagatggagtggggctctagcacgacaccagtgacacacacgcacacaagcatgcgcgcgcgtgcgcacacgcacacacgcatgcacacacacacacatgcatgcacacacacagtgcacacacccgcacatgaatctatgaccacactatgtacttcacatatacgcagtaactttttttttttttaatgtagtaaaatgcaaaaggagggcttgagttagaatgtaattatcaggaagggacaaaaacaaaacattaaaaaaaaaaataaaaacaaactgtcagaaatggatagtaatagtaagaagaaaaacaataacaaaacctggacaccctgacagaagccctggctaatgtgttgggaaaacgtagacagcctggtttgaacacaggaatgcatttaaggacggggctgttgatttgtgagtacagcacttgagtctgctagctgggttttcatttctcaagggctaacaagcagagacctggactcctgttctgagcttaacatgaaggggatcctgagcgaaatgcctttacttatgaatctcgacttcctcggctcttgaagctaatgcttgctatttcctttgaggtacacagaggctcagccttcggagctttctgcttgcttttgtgatttgtgagtttggatgttccgctacactaagtttgaagaaaagaaaactcgcccactcacccacacagcacttagaactcaggtggcctcctccctggaacagctgaagttggaaggggctgagctcccggggctcccggggattatgaaacaagttggaagtgcagaacagcctgcctgtattaaggcacatttcaaccatttctgcccctctccccacagactcagcccccaactgaactgctcattcggtcccctgggggaatgtcatcatgaggtctctgtctcccagagcatccactgtgctcataaaacaggttcatcctgtcttcaacagagagcctctcttgctctcggggctccagacacagtgcattaaggagctatgctcaagacagtgagcaccaggctctgggacagcgcctgagatgtgcccgaggaaacgtagagtcgtgagatgcaaagcttcctgagggactctgtagacacgaagccaccccaggtcctcatgttggcagtgacttctctcaggctctcactctgtaagtcttccaggaattgctagaagatgcagacacctttcactgtccctgtgtgaccagcctagagggcacatgggagcctttacaggaacctaccctctgtttacaaagtccttctcagtgtctgctctctgtaataaaggaaagagcagtatcctgtagcaagcaatcttatcatactgatatgacccagagaggtaaaataaaactaatgatcctaggaaaggtttcactccgtgaaaacctaggcattctgagaattcactgaaggaccagtggcactctggaccctttcctctaagctgagccagtagctctatggaatcctcatgagaaaatgttccagacttctctgtctctgaaaatggaatcttagacttcaggccacaagaggtaaattctgaattactctccgtcttagttagggttttactgctgtgaacagataccatgaccaaggcaactctttaataaggacaacatttaattggggctggcttagaggttcagaggttcagtctattatcatcaaggtgggagcatggcagtgtccaggcaggcatggcgcaggcagagctgagagttcaacatcctcatgtgaaggctgctagcagaatactaacttccagtcagctagcacaagggcttccagggagctaggatgagggtcttaaagcccacactcacagtgacacacctactccaacaaggccacatctactccaacagggccacaccttctaatagtgccactccctgggcagagcactgtctttagcagatggattgtggaaaatatatatatgcatgtatacacacacacgtgtgtgtgtgtgtatgtatatatatgaatgacatgatcttgccatgacatcaatcttctgactttgagctctctttaaatgctgtgaccacgtgggctcaacctttcctgtggctctatcctatgaactgaaagtcctgcatgggaagggcaacagtcccatgggaacatggcttcctgtctggggtgcaatggccttctacacacagtgactttctatgaaagtagcatgcagctgaaagctagaacttgtccagccattccaccagcctttcgaagccaagtgtgcatctcttttccatggttaatgacagccctcccccctccccccattcttggaagacttcaggaaacctcataactggcctatgggcctttcattcctactgggtcctgccttggtctgtctccctggccatcaaaccagatcacatgggggttgtaccttttaagtttctttcctctagatcttgtggatttgatgactgtccgtcacctctgtgagacaaagaattgtggaaactagactatgaccccctgaaacacctttgaattcactctcctttcagccctataccctgtagtgattgcatgaaccctcctctggtacaagatctgacagccatcactgtattgacatgatcacaagacctgacccccatgaccaagcatcgccatgtggtcacctacaaactgacagagacaggaaataaagaggtctctgaactagacctaagactgagatgaacatcacccaaaaaagaccatgtcatgatcctgcatcctcacatcagctcttattccaccactgattttcacaatgggtcgtccaaagacaaggacccaggatcacttgtaggaggggaaggagataaccacgcccactgccacaggaccctcagcctgaagcagccagcactggctttatgtacatgtgtacaaagcacttctcttctcttctcttctcttctcttctcttttctttttcttcttttttaaaaaagtgtaatgtttaaactttcaaaaccatcacttcttctgtgacaatatatggcaatcatgaaggcccactctagtctgtgcctctgacccaggacccatcaggctgctgtttttcctctgccagaagtgacatctttgtcctgactgcatcctgagacgcattcagcttacacagtaggtgtctgctgaaggtgtaaccagacacagagaggacaggtggaagctgtgttgcttgcttttcttgttgttgagatcaaatacctgacaggaagtaagttaagcgaggaaagattcatcttggctctgggtttgagggtacagcccgtcccagtgaggaagagtggtccgtgtagaaagaagtgtgcatctgaggctctgcctcacatctctggatcatggaatggtgtggtctacatttgaagaaggtcttatctgctcagttaagcgtctccagaaatgccctagtagacatgcccagaagccaagttgacaatgagcactaaccttcccaggcataagtgaacccaggagggatacatgatggtgactatatccaacctcttgagaatgtgtgtcacttctccttcaaggcctaggccactcagaagctctatctggaatgtccttgcctgaagttatctttctgacaataaatggtacatgggacttgtagcaggtagagttggtcataaaatgtcataccctcgagtcattctggacttgccaatgccaagatgaatattgtctgagcacccatcacttatcacttctctacctggcaatctgcatcctctgcaaagttagatgcacataagtatatgtatccttactactctactgatgctcacctaccttagagtctggccatccacaaagagttctgtggactctgccaacattgaaggcctgtggcctccaaccacagaagcttctggtgacctggtccttcctgtcctattacttgggtggcttctttcacctgatgtccaaatttaagataaatgctcaacattgaatgcaactgttattagttattaattttattttgcttctgtctaatattcttctataaaataatgcagcaatataccaacacaggtgcctgtttcattatttggcttaccatttctggtcttattgcatgaacaaagaagtcccaagatgctcatagatgtcttcgattggatatatggacttgttctcttggatctatgtccagatgtggaatttctgggtcattctacaattggttctttagtttggtaaaggaagctaaatcccaggccacatttcctatttagctgtctgtagatatggatgaaggctgtgcttgcttcattccccaaacactgagttttgcacctgggctgttttcatttacagtaactattcatctgtgttttctgagttttataaccatccttttaatgactagagagcgattggtggcatagtgatgtttcctttacccagcctcctgtcatactgaagtgagagccgttttagatttagaatgcaagcattgatatcatttaaatattgtttgtgggtttctttgaaataattaaagcatgcagtaattcctgactcgagtcctgtctctgaagatattcttggtaacgagtctccacacatcaccgctgtaaatgcaggctctcacaaggggacatgtgttccctcacagcactaaacggagcttcagatttcacggataggaagggaataagtgacttttatcatgtgcacttttatgggagtcacgtggctggtgaaggcacagctggcaggtgccacagcacagtcgaccccttcatgggacccctgatactaacctctgtgtgaatccagctgttcccagaagctgtgaggcagacaacaatgctcaagtgtgggccgcatctggaatgattcttagccagcctggtgccccgttggtcttctaccttccaaaaaggctgattggcccataaccaagttgacagctttctgctgagcttttctacagaaagcttatccagaagagcttcccacacccaggccttgcctgggtctccatcacgattcctgactgggtgtcttttcaaattgtgcttttattttgtgattatatgtttggagcccatttcctgagcctgctcaaggctcagggaactgttcaggaaattttatgtggatgagaacaagctaagttggctttcacctgtgatggcatatcatcccagacagcatgtttaagtccaaggaagttacttcacattcaagcattttcccaccttttcacacacatgtgatcaaacatagttagtagcacagcagttactatttgtgcgatataaaaggcgtttagtttactaacaagctaatgtaagttatcagccaccggaaagctctatggacaaccctcagataatttaggtataatggcccaggtcattagtatggttatttcacctggaagactggatgccagtaggtctgaagctctctctgtttctctcctctgggacctcgatatggagtggcatagctatataacaggcctggagctttccagagggaagggagaggagctatgttggtcagtgtgtggcacaggctatgttgatttgtcctttcaaccttgggaatgcctcccccaggtgactagttaatgagagacacatagaatgcaggtgagactcctcgggggcagttttctcccctcgctaagcacctctgcctgcctgtcaacattacattacaatcctgggagaagagacggttgttggaatagcgcagagtccatggcatctattagtactttctttaaattctaccaaaattgtgtcataatgttaagagccccactgtcaaagtcagtgggaaccaaccaggagaggcagatgactgaggggtagggttaataacataatagaagcataatatcaggagacttctataagggaatgtccactctcggatgatgggcacatacaagaaagtgcttacccccaagattgacatagaggggaggtggcctctcctgagatagacacttggctttcacaagaggcatttccctgtatcctggctatggaccctgcataaccccagtcagtgacggatggcacagtacccacctcagtatctccctggagcttggctctgccccacagcaggttcacgcccctttcctttccaatagaaagtgctctgcagtaaaatgcatatggacttttaaatcagcttaatgaaaaaaattgttatagtagtgcaggacatttagagaattataaaatgctcgcaggctggccagtctgtgacaactctcttcttatgtctttcattttgtcctgtaaagtggttgtatttattttgttaacttgtgggtgtgagtatgcatataagacatgcatgttgcagatggggatcagaggacaaccttgggtgtcaagtctccccttcgaccttgtttgaggaagggtctctcccttactgatgcatgtactaggctcgctggtttacagtcttatgggaagtccacttcctcagcctgcatctccctgcaggagcactagggttgcaaatgcgagtcactgcattcagccttctgcatggattctggggacacacacgtgggtccttgtgcttgcatgtcaaggactttatccaccaagcatccctcatgaatgtttttacatgattaacattatataatttccagttcttctaaaggatacattcatttctagcttttcccttgacttgctgttgctgctgagtatttctgatgttttcatataattttgtaaacaccaatagagtgtctggtggttatcagaatgacgaagcatccctaaaaagtaaacatgaagcttgtttccctttgcaggccttgctgcacttcctgctggctctcttgcgtctctacttgggcaatactctgtttagactgtatgattttctccctgtgaaactgaccatttttgttacatcaatgaacaatgcatgcatgacatttaattccttatcttgataatgataatcagagggagggtgtggatatgtctcagcaaaatggcagaatgatgtgaccttcaggacagcccttaaggctgagggaaagaacattaaaaacatgagttcaaaaatatataatttctcaactatgtaaaaatataaggatgcagtatgaattgtataaagatcttctcagacctaaaggaacagaggcagctgcactattagccagcttgtccaaaagatgcaaagactggaagatacaaaggtaggcagactcctgagttcaaggtcagcctacaaccaagagagtttaggttcaaagctaggtatggtcagaatggtaattacagagcagtatcccacccagctatcttctagtctatgcttgtgcttgctctctcttctaggaatcaagtggctagggtcatgggatgctgacccatggaataatcaaaagggaacctgggataataaattaagatgtgaataaaaggctgggatttttgttctgcaagagatgagctttccagagaatttttagaaataccacagagaactgcttggagaactgtctcaagcagaaccgaggccatcagcttggacctataatttgactttgagccatttgttttgctgctctcaaacaccccttctctcacaacccctctccaagcccatgctggtccttggcaatccatgtccacaagtctcttacaatagtctcgtcatgttcttagcatgcgtgccttcctatggaaacacaagtgcaaatgattcaatattttcaagctttgtacaatcccctccccaaataatttctgaggaaaggtctgtcaacagaaacttcctaaatgtgtgtgtgccacataccttctcatctgttcctggaagcaggctgcccagagccaccctatgcccttcctcaccaatggagtggatgcagacactaggatccaatactgaggctgttgtgaattcccagaaagatgattcacactgaataactgtctttgtaaatagtccttttggaagttcacagtatgaagtgtctaaacttgacccgtcagagatcgttgatcccctcatgttgtgcttatacaggatgaggcagctgttgactgtgtgaggaacccaggaagaccagagaacagacagggagagggagacattgaacatgtggatccatgtttctgagggacagcaggtctggtctagtgggaaggacagagacacaatttcagagaaacaaatataaagtcatccatccatggtgacacttctaaccagctaggaagcaagaaagcaaggtgtctttcccaatgtgtgatttgagaagtcatgaagaagtggccctgtgctgccctgtgctgtgactctcagagatttcactatttgctgatgtttcatttaagccagtggtgctgtgctgtgctgtgtaattgcagttttctccaacaataggctactgagaatgcccgcttatgctgctgtgtttcctttcagcctacagacattggatattggaatactggacatttttggttttgaggaatttcaaaagaatgaatttgaacaagtaagttttcttttaaaatcttgtgaacgtttattgattttttttccaagtcgtgcttcatattaagacattcaaatgcagacttaaagaagcatttcctgtctttagttcaagttagcatcttggtgtcttgacagcccattgcctgtctatggttcggggaatcccagggggttcatatgctcagcgtcacctgtttctaagttcttgtgaatgtctgtagctgtgcatgggcacatgggcactgtgctaaagcataagatgaagactgaggacatttgaagtcaggaagcagccctaagaaagcttagcccacttcagagtgcaggggccctgctgtgcctcaccctgctgtttgtgggctcgtcttgtgtgacattcacacatagaagtatcggaaacccacaggcacgtcagggagtcattagttgccttcattcaccatctgtaaatgatgcttttaagaaagatctgacttgtttgtgcacctaaatagtactgcaggaattgtttgtaaatcaagttaaatgtagtcaaaaatgtaaacattaaagaaaagcagagatactcttagcagcctgcacagaggccatgtaacttcacagcacttggagaaaatcgaatttgttgctgcctatctgtccaactacatgcaatttgtgagtgctttgttgacttttattttcttaaatgtacagtgtgggttatcagtgacactggacaagggttcacatagaatccacgtgacagccagttctgtgtcttttagtagccgagatgtctgggctaatgtgggttacctgttgtcattctggctttctctacttatgtgaactagaagagtaagagatgaggcagtgacagtagaggctgggctggtgtagaattagtattctacaccatggtattccactccatggttttctgtcttgtgtgggaacactagaaacagtggagcatcaactcagttttggtctagaacagttctccatgtcctccaatccagagcactggttagaagtaaggctgcacaggccatgggtttcttccttcatacttattgttcacacctgcctgggtgttgttcacacctgcatgtgtgtatgtgtgttattcatacccacctgtgtgtgttgttcacaccaacacacctacctgtgtgttcttcacacctgcctgtatatgttctttgcacctgcctgtatattttgttcacacctgtctgtatatgttgttcacacctgtctatatatgttgttcacacctgcctttatgtgttgttcacgcctgcctgtatgatttcctcacatctgtctgtatgtgttgttcacacctgtctgtatgtgttcctcacacctgcctatatatgttgttcacatctgcccgtgtgtgttgttcacaactgcctatatgtgttatccatacctgcctgtatgtgttgttcacacctgcacgtatgtgttgtgtaacaggagtaataaaagaagtaggcagtaggagcaggagagcctgcacattgctcccaggtctgcaggctgctctgttgagctctgttcagtccctgagtattttcttctctagtttgaagatctcacatattcaccttaggaaaaacacacaaatatatatgtatgcatacacacatacacacacacacacacacacaccttcatgtatgcaatgatatccaccatatgcctgtgtcccagtaaatgacacatagaagtcacagtggaaggatgtctcaggaggtcccgttctggggagactggcctccgatacagctgctccacagccaggctcggcttccacgcacacctgtgctcctaggatgatgcacacaacattggtgttacctccatattaaagcataggcactgtacaaccatcacagggttctttattctgtctttgtggtgaacgtgtagtgatgtatgtcagcatatgctctcagcttgtgatttctgggtatcagggagggaacattttcccttcagatctaacaaatgtgagtttgaagcactgatgggtaaaaatgtcaagatcaatcttggactttgatcatgaaagaagaattttttaatgtgctgtttcctcagctggtctgccttgctgctatacataacagtgactaggaatcttccagaaagatcaggttgtttatcagtgtgaatcaacagtatctttacctggcagcagtaaattccaaaatttgcatatgaactttctttttaaggccaccggtttaattctctgtggatttctttgtcactagcaggacttcgtcattttccattccaccgcccacctaagctgctgtgcttaaggaatcattgctatatttgcaagcacacctaagggacagtattcccttagaagcatccattctatcctgttttgagcttattgactgatagatctacttttagagtgccagctccagaaggtttgaaattgtgtctggtacaccattttgtacataactgaactttgtcaaaaatgtttgcaattgaaatttatagaagaaaacaaaactggtaatgaggaaatcctcacagtaggtttccagctcgagagagacaccctaggggagatagcaggatgtaccccaaagcccaagcatccttacctctgtgtcctcttccccggttggcctggtgcgatggggatgctcatggtctcctgtcacaaattgcccttcgctggttcaacagtttatggtcattgtcctcagctctggaggttggaaacccaagagcaaggtgccatagtttccaggttctgtgtctgctgaggacaccttctcaactggaggttcttttttcctgtgtctttataatgtcagatgcaacacctccctccacccccataaaagcagcaacactgttcacaaggacaggggtcctattcacagatcattaccttccagcaccatcactaacgggatgagatttcagtgtaggtaggtggtgggatcagaggcagctttctaatgagttgtgatttcttgtattatagtgaagatggttttctagactatgtaacttggcagtgtgtaagatgtttcagtggagataaatatgctatggtggtctattacatgatagatggcaggcaggcaggcaggcagggagggaagggagnnnnnnnnnnnnnnnnnnnngaaggaaggaaggaaggaaggaaaaagaagagagaagtaggaggagaagaagaaggagggaagctataagatgactgttcatgagccagccaggaattagaaaacccaaaggcagaaaagcataataggataatccatgatgttgtcctctgcacaacctcacaggggaaactgcgtggtaactaatattttttcatataaaatgcagggaaagtggtgaggggaagagctatacattaaaatcaacttaaactcatgcagattggttgatatgtgaagggcattgaccctgggtttttcagttaagagtaagagactgtgagcagattaagaaatgtgatatgtagataccagactaaaattaaagtccacccatggtggaagtccagagaatgggcaagaagttaaggcacaaatacaggcgatgcccctgattcccagggtcaggagttcgagcacacctaagggatggacggcccttggaagacctgggatagattctctgatttgattctcagccatgaacctaaggagatgccacttttcagctagacctccctcagcttgccttcaccagctcccttaggcgggcctctaaggaggctgctctgagagggttacttgcattacatacagtcagttggccagttcccttcgtagctatccaaaggagcaagctttggggcacagtagcctgaccagtgctccacctttacaaggctgaccctctgtaagtggcatcatcacaagctaccatgtccataaaggaaggcaagtagaaaccactcctccctgtgagggagaagctgattctaatggttcctgtgtagggggatgctgcagaaggtttggtgatgaaagctgctactttagctttaagggaccatggtccatgtggtcttggccttagcagattcctgaaagctgttgaacatcaagacagacccatgtgctggatgagtgatgagcgacctcagagcgagcttaactcatttcccatgcagattccaaaacttagagagtaggactgcctctgtcttaaagtgttttctgctccgggtggttttatagacaaaacaaacagttaaaagaccacatggcatttctaatatgcctcttactatatcagattctatgtgtaagaagagtattaggggcctctttaggtaagctgatgtgtgcaaactgtgagcatctacactgtgagtttaagttctatttctcaaaacaggttctgtacattcattttcattatttggcactgaagcaaagctccggtagtttatgtcactctcagtgggatgaagcctgctgtcctgttgctcataaaagcaatctaaccctgagtccatcggaggactgacccaagcctttacaattagtatccattttctaaactccaattgcttctccctaatgactggcatttttattacttcttcaaagataggatagtagctgttggtgagtacaaaaacaataccccattagtgaattttacatgttgttatttacagcagaattttacaccaaatccatttaaaagcagtcaattagttaaaacggaaacggcaggaatacctttccaccctagaactggggccattaaaagaaaatgcttcagaatgaaaaggaagaattgatgcaagtctacgtgcacacgagagacatattcaacactaatgtcaaggtcccacttcagactgattaatgtggaatcatgcaggggacgcacctctgggagtgtaaccagaaaggctcaactgaggtgcgaaggcctgccatgtgtggagcagcactgtctcaaggctgaagacctgggctgagtaaaacagagaaaggagaaagccagatcagtccagctttccactccctccttgagctgacagcagccagcactctgtccctgcaaggctggagtgcgccctcccgccaggaggcaaaggacagctttctctccttaggtttcccttgttatggcacggaggaaagaaatggagatgatgaataggcctccgttactgcatatttattccttaataatcaatatgacagggtcgaatattaatgaatactatataataaccccagagaagagtgagtgttctcaggattaacaccgtggctgtctgggaaaaaaaaccctgaagtcctaatggtaaactaggggagtgttgtgggtggtcttggcacatgatggacgatggatagtttcctgatgcttctcctttgggtgagcttattttcctgtgtggtctctcactctgactgtcttcacattgctaagggataaccccaaagccttcgtggggcaaacctagagctcagagacagacccagtgggtcttgagtcccatgctctgtcagcctggaactcatttggtggaaattatacgtcaatctattctaagcctgtacttgtaactttatgtgaagagggtatgttgattcagccaaaagtttattgccaaaataaaacgaaattatgcattcattgttttctttggggaatggtaaacaacaagaaacaatgccagaacctttgaattaatggcattttgggcaaaggctctgtttttattctagagcctggtttctacccaagctgaggtgtgatttaagaggtgtccttcaaaatatctaaaagtcattttcctctgacctgatgcttttccaccctgagccggctagtatgtgggaggtatggaatccaaccggttgggatgctttgtgactgtctggttgcttcctgaagatcaaggctcagacccaacactttgacttacctgaaggctctgtgctgtggtaacagaattcttgttcccagacaatgtagaataggagagatttattatctcatggttcttctgggatgccacctgtcaaggtacccaaaggttttatatatggcaaagttgtgtccattcctaaagtatcttctggacactcgatcccctgtggtgggaggcttggtcctcacaggacagatgagcaggagggtaagggatgaggcagagcctaccaggcccttcactaggaactaggaacatcatctgatgaaggcagagaccaacctcacataacccagacatgtctttgagactccatattctcaacacgtcattgagagtcaagttgctaacacagagacttcaggtagcaggacccactggcatcatcttcacaatgaaaactgaaccaactaaaggaagtttctgtgctgccaaaggctctctcagagaagtccagtgtcatcgcagccatgaaggcaatgcctgtgtcaacaggaccaggcttctggcagtggtgaggcactctgtcagggtgattgatgggggtgggaggcaggaagtggacacgtttaaaagccaggaaggtgggggaggaagctttgagcaagagacaagatccagaagtattaaaaggacaactgtaagggaccctgctgcccttgccagctcccactttatatgcaatgtattgatcacagttgaccccctgcagaagcaagtccagcaatgtggacaacaggaagtgttcagaagaggcaagctggagacccatcacctacccgacttctttttgtttttttaattcatatttataaaaccaaagtgctatctgtcaaagagatgaatctttagtgaatgttttagtcattctggggtggggggagggtaaagaaaagaaatacaagcatttggaattttaaacgatttgaattacaaagactttaatttcttcctaaatttgatttttgatccttggcttatgtaaaatgacactatttctttgaatgaaacttgttattaaaagtcattcaactatttgaaagtatatcaagacatattatcctttttttctttttttttattagatattttctttatttacatttcaaatgttatcccctttcctagtttcccctctgaaaatcccctatacccttccccctccttctgctccccatcccaccactcctgcttcctggccctggcattcccctatactggggcatagagccttcacaggaccaagggcctctcctctcattgatgaccgactaggccatcctctgctacatatgcagctagagccttgagtcccaccatgtgttttctttgattggtgatttagtcccagggagctctgggggtactggttagttcatattgttgttaatcctagagggctgcaaaccccttcagctctttggatactttctctagcttcttcattggggaccctgtgctctgtccaatggatggctgtgagcatccacttctgtatttgccaggcactggtagagcctctcaggagacagctatatcaggctcctgtcagcaaagccttgttggcatctgcaatagtgtctgggcttggtggttgtctatgggatggatccccaggtggggcagtctctggatcctacccgacttcttaaaggccttgggaactcctgcagagaagcttgtgagcctagcttacttcagcatttctccagcaggcgtcagcctcctcaatgttttcttagaaaaaagctatcaacatctcagacagttaaatattctgggtatatttgtgaactgtccactatctgaaatttcattacattatctatctactatctatctatctatcatttatctatatctatatctatcatctatctatagctacatctacatctacatctatctatctatcatctatctatctatctatcaatcacctatcatttatctacatctacatctatctatctatctatctacctacctatctcttctatctcacacacacacactcccacccacacatgtgcccactaaagcacatcacactttgtacatatatctagattaaatgccgaacaaattggcaaataggctgtgctccctttctctcatctggcttggtgtgttctgcagccacctggaaagcttttaaacacatcaaagcccgggctccactccaatttagtgggtttggggtcagacccagacatcagccaccttcacagagcaggggatttaattccagtgagcagaaaggattgagactcggtgctgtccttactgccgggcactcagggctccgccttctactggagtcagctttaatctgttctccccttcattttgtgatatacgggtcatgcactgtttagttttcctccagatagatttcactgagcagtaaaaatcaagggagaacagttggtggaaatttactcaagaaattaagtttgtcattaatacgaatgatgggccatctggataagccacaaggttctgctgctgaagagagacttcaaggaatgcaccacttttattattaaacctgctagtttctttcatgtatgaagcatgtgtcttaagagcagtacccatactaattaggtggctgatcagtgttaacttatcctcacccttcacccactttccgagtctgctttgggaagttcccggaagtctaataggcccctcacacaaccccagtggggagacatgtaaaggagaaatgactattgtctttctttgaagctgatgttgatcctctagattatgaatgcagatttatacttctagaaacttctagaagcatgattaatgtacttattaagttttcctctgaggggttgtacacctgtgcatgcacacgctcgcacgcaagcgtgcacacgtgcgcacgcacacacacacacacacacacacacacacacacacacacacgccttaggtttctgtatctgactgtcccctgagccaccaagctacatcaggtacagtccaaaggcaaggtgaatacacatgtagcgtttgtaactcagcacagtaacaaataaatggctgacatagatgttggtaaatctgaaaacccaaccagaaacgctggcactcctgagtgttggaggcaatagggaagatcatgtttagaacaaaattaatataaacaaaatgcataggctttgttcataaaacaaaacggggaaagtctctagcttccccaagaaagatctctctgtattcttctttcccaacaaccctaagtcttcctaggtctagtaccattgtaacccaggtagcagctgatcccctctggatacccacacctcctctggaagccagtatctgcttctttctagggagcacagtagcagaatttgcttctaggtgccagtctgtgatctgaactcctttcctactgatcagcatcaggaagagtcacacagacaaattttaatgttactatgacagatggagaattatatatggaaatatatcaaatatagtattaatcaatataattcactggaatagatataaatgttcacaaaaatatattaatcaatataagtacattaaaaataaaacataaacatgatatattgacagttgtacaatgagaacaaaaattcctagttctagataggaaaccagcactccaggactactatcctttctgatcatttcgtccttaggtctctgatttcacagtgtaagagaatttctgtagaattgaagattatctactacaatctttacaaaaagagacagaaagttaaacaggaaccactcagcactatagtttccttgtaatcttggtgaagcctaaaggacaagagaaaatctctttaaatttggaatctctgcttccaacatggtgttcccaccactactccatcaggaccattggagttctcagaatcttctttatattctctctctctctctctctctctctctctctctctctctctgtgtgtgtgtgtgtgtgtgtgtgtgcgcgcgcgcgcgcgcgtgcgtgcgtattgtgtagacatttatggatatgtacattaccacagtacgttgctaggcaaatgcgcaagagtcagttctcttctaccatgttgttctgggaattgaactcaggtcaccagacttggcagcaggtgccttagccagtgtcttcatttctcaggcccctcccttttttgcatttgacagacagctctctagaacatctctcctctactcctcaaaaactgtatttcataggatatgtggaaagctgggagtttctgagatttaaagcaccaagcttcttagataagcacacatttggtgtgatcgattctcttgcataagaacggtcagaccagatgactgtgcagacggctgaagatgcaactgaagcagagattggtgatctaaatgggacctgtcactctgccctgtgactgcagcaaagagaactggatggggagaaaccttccagctggcaaagggaggatgcattcagcatgtgtctcagtcagggtttctattcctgcacaaaacatcatgaccaagaatcaaggtgtggaggaaagggtttattcagcttatacttcccacattgctgctgtacatcagcaaaggaagtcaggactggagctcaagcaggtcaggaagcaggagctgaggcagaggccatggagggatgttacttactggcttgcttccccctggtttgctcagcttgctttcttatagaacccaggactaccagcccacggatggcactacccacaatgggccctctcctcttgatcactaattgagaaaatgccccacagctggatctcatggaggcatttcctcagctgaagctcctttctctgtgctaaatccagctgtgtcaagttgacacagaaaaccagccagaacatgtgagcctcacagtaaaaccttcacctgtggggaccagctggcctgtcccctcgccttacctcaccaaagctctgcctgtccatcagagcctcactagggagcttgcttctttcctggagtacaaatctccagcaggggttctggaagagaagctctttctgtgaaactgttaagtctgcatatgatgtatccctgctgaggaaagaacatttatgtttgccacttccattttaattatgaaaagatagagatgtttatgaaaatagccagtagagaagggaatttgaaattttaagttattctactttgtttcaaaaatatatcttgttgtgtttcctcaacttaaaatgtcgaattccctgaaaactgaggttattttgttactaggaaatagtagctgctataaaattattagactttagcatgaagtgtttaccttaagtgcacaaaagagaaatgtcccttctcctgaaatggaaccactagaaaatattagtttagttataggattgctcagagagcacatgggggagaaaaggggctctggagactgaccagcttggtcctgcaggaggtaggctggaggcaaagcagagatggggctgatggagctgaagggagtcaggaagaatgatgtgggcaaggcaggtgtaagggccagttcctgcagacactggggttaggctcaattctcaacagctgtgttcctggaacccaccctcctcctccagtgacacccggcagacatcttcccctttgggcacattctcccagtcttgggctttggcctctcctgaccgcttttcaatgaggttggtgtgatccaagcactgtgtgtgaggtggggagatggtggaggaatatataaacattttaagataaagcaaaagcttaagggaggggctgtatgagggggaacagggaggaggcagggactgtgattggcatgtaaaatcaatcaataaattaattaatggaagaagaaataataaaagacctatgactaaaagataacattctgttttctctggaaagagagtaattggagggtatattccaatttaaatacactatttgtgtcataaagcccttactctggatataattagtagaggaaatctatgtctactttcacctataaccaataggtaaccagaagcaggggacacaggagccccactcctctccctgggagcccacagcagaaaggcatttctctccagttgtcctcaagagcctgatccatcttccttttagaagtggttttcctttttttgagtgctcgagacttgtttgcatgttggcactgtggttacatttgttgtatttaacatgcccacctcatgctgaacattgggacaatatgacctcacaagtgactgagcgaagctgtcttccagggcaagatccatgagtcatgcaaatggaagacttagtctgaatgtccccatctgtgtgcaactgggggtggggtgggggctgtagcattagcaggtggctctgcatagcagactgtgttatctactgtattgttttcttccctgaacagctctgtgtcaacctgaccaacgaaaagatgcaccactatatccaagaggtgcttttcctacaagagcaaacagagtgtgtacaagagggagttgccatggaaactgcctgttctcctggtaaccaggctggagttttggatttcttcttccaggtacttacataacataattagaaacttaacaggatgcctgcattcaggtgccccggagagagagaattttctttttgaaggtcttgtttgtgaggtatccttgtatatgagattctgcaatgccttcataatcccccaatagattttttgagaagcacaaattatccttgcctgaaggggcgttggaaagctcacaacttcattgaaaggacaagaaacatcagaacttgctcatataaggatattcaccattttacttatcaaacctaaaggtctcattagccgattacatgaggccaaagcacaaaatgagttctgtaatctgatataggccgagagaccatgaaatacattgtttgttgtgcattggtccttaaaggtcctaaaatttaaattttgaaatgttggcagaaaaatatatgtgtatatataaagtttgattttgagttgatctttaattaaaattcggcctaattgcatcagcatatgtttatatccatatttattgtttctgtgtacattgaaaagcttttgactcattatctttattgtatctataaattctataattctattattatgtaaggcagcaagatatcttagtggtaaaggcacctatcatcctggacatacctgaaggaaggaaacagccaactcttgcaagtcaccctcagacctgcatatgaatgccctggtgtgcaaacaggtggacaggcacatgtacacacacttgaacacacacagagacacacacatggtagggggagataataaatatatgtgagagcatgttttatcaagcatgtcaacagtaacttctgtttcctattataggatgctgtttgaagtcacccatcacttctaaatgcttgactagtatttcaaataggcaccatctaggtttttttgaaagcttgtagtagcactttccaccttctgtctctacaattgtatatttctctaaaaccatttgtgttttcctaacactgtagcagagggatctaattcctgctacccagttgtcaggataagagttatatatgagagatccaaggtggcagagtgcatccgtgggcaatcatagacatgtgttaaaagtcaaggcactcccattctggttagctgtgtgaatataataaaattggagagcgtatgtcaaggatgccaagtggagcaacagaagaaaacgtttgacctttgctgactttcagaaaccatcaggattcttctccttactggatgaggagagtcaagtgatttggtcaggggagccaaacctccccagaaagctgcagggtctcctggaatcctcaaacacaaatgcagtctactcccctgtgaaggacggcaatggaaatgttgctttcaaaggtcaaggtgcggccttcactgtcatgcactacgcaggaagggtgagtggacggcgacggcccacaaggtgtgccctgtggactgatgcaccaaaggggagggagtgtcagagcacatggttccaggatgtgttactattccacattcaaaggccacatgaacagcctgcagtcattaaagtttgcagattgcttgccttcgctttgagtgtgagttcatatcccagagcagtgtgtgctgagcaggggagttatctcactgtgtgtggagacttcaattagcgtgagtggaagagccttgggcttatcataaatagctttactccacattttggggataggtttcttatataaactttgggtttctgaatatgcttggcctgaatgtgagcttagtattgttgtctttctcttagagcctaagaaagcaagccctccaactttcccagtgttttagttgggtttgtaaaactggtttctccattcagagtctaatccacgcctgtaggggtgtccccacacttctttgccatctaatgttagaatgctccaagtgagtgcacctttgccccgtgatttacccgccataactctctgacataagtcatctcttcaggatgggtgttctaatcctcatagttgtcttgggtccttttcactctcataaactccttttccaggtagagtagaaacatccttccagcctacttaacaacacatttaccacctctcaattaaatgatctctgttcttctctactcaactcttgtttattattgatgccttctactttaggattataaacacacacacagaggcagacacatacatgcacacagacacaggcagacacacacacacaggcaatcacacatacatatacacacaggcagacacatacatgcacacagacataggcagacacacacaaagacaaccacacacacaaagagagacacagagagacacacacacagacacactcacacccacaccttgagctaccacttagtgaaaatgagggacttgtgaagtatcccatttgatctcttcccatgtttactgagatgctgctgtccatcaaaagagatgagctgggaatagcacacagctaacagtcagatgacagcagaagtaacaaacttaatattctagagctgtcagcataatgctatgtaaggatgcaattattttgctcataaaagtatatagacttctccagaggcacttactaactgtgtaggagagggtatttcagcagagacttaaactctggaagtacgtgtcagtgtattacacagaactcacttgcataagacagaaactactctcattgtctgcacagaaaacaacccagcttagaaaaagaactctgagagggtctcagttgatattttaggggtgctcctaaagtatgccatgaacctgcctgttgtcagttcctgtaccaatcgataccccagcacctgtggaatagcagcaagcacgccctcgcactcagtatcagaaaagcaggggctagactcaggattcacagcagccacagcaaagagaagctggtacgtggtgggcttacctgttgacatgtcagaaagcacagaggtacagcctctgtcacttctgccttctaagccagggttggacagatggaagccagagaccattgagctctctggtgcaacgtagtctgcaagggaggcaattacaggaagcagtaagggtgaatgggcaggccccccatatccacccacatattttggaaaggatacaagtttcattgacagtggaaagagtgatagggtgagacatttaatattattgctttcagctaatccatggacatctgtgtgtgccctcctgatggctccatcctctagagccatggctttgtcagaagagataagatgaagtaggaataaggagatgatgttagacatattaggggaagggcagagcaggcttttgtgtgattggccagtatccacatttaggataaggggataaggaggtggcatccatgagaagaggatgggaaggcagggagaggaaaaataaccaaagctatgggcatgcggcagtagggtcccactgtcctcatgtagctgataagcagggactacactgtgtcaacccaagacatgtatcccaagaggaaaacctgaaaatgctcaggctcagatctcccaagctggtggcacggagtttaatgcagaccctgtttggatggtgagcatcccaactgagccaacatatgaacagcatggagagaaacaactatggacaggagggtcctctcagatgctaagggaggagactaggaagcccacctaatagggtggatgttaggcagaagatgcccctgtgagaacttggattgactgatgtcattagatgcttggagaggcttgtgggacatgggaagagattgatgcaagggcctatatttttaatccctgagtagttcccagttgtaattctccttggcctcttcaaagtccttacaagtagaagaatattccactggtgtcttcagattctttgaactctgccatcttcacattatatattttctggatttgggaaaagcacatataaagctacagttgggtatcacgacttcttctaatttaggaaattatttcttaggagcttcctaggatctctgctaggccagcatctgaatgcccttattcttaagtctgttgcattgtgccttatagacaaagcagacccgtaagacacactcagcgttaaaacccaacaaccgtgtggtttggaattatagcttgattattttgagttcagttgtaattatttttctgagtgcctaatagcatttcaattttaattttgtttttgaaactttaaggggaaaacaactgacagtttaaattactaggcgattgttcaccgagttcttagagaaattaaagagcacaggacagcccgatgattagttggtacagagccaaagcccccatggaaccgtgcattttcctttaaaagcatctttgtttttaaagagagttttccataattggagttgattctgtggctttacagaaatctttcattttactgagatgtactaatgagttgtagccaaaggagtccccaaggccctgttcacgtgctacagtgtagactctatgtgatttcgagcaatatgtcggcccatatgccttttgaattgtcagtcatagccacaggcatttacgtgttggattgttgcattggaaaacaaaagtatcacgaacgtgttctccgtttttgttgattaagtgatacgagaaaagttcactcacctaaaaggagctatgtactgtggatgatataacccttgaccccagagctgactcgcaaggagagagcccagtgaatccatgagcctccgagcatcttctcgaccagatggatggtgtgaacatcctgcctcactcggtgctcctgcctggtgggctgacttgcttgttttaatgggactatgcaacatccagtgggagggatagttcacagcagagctgacactagagttgttcccctgtccctggctggatgggttctagaagaacttccccaacttgggaactctaaagaggagcctctgccctgcttagggagctttctgaggcggaagctcagaggtcctttcaggaatgtttaagcaccattatctgaattccgtctgatgatccttcctaaacacatctgaatgtttcattacccccaggagcatggtgcagcttcctgtctccattacagaaatattttaaagtaaatggggagaggctgtgcatgaaatattaacaagatctcattaatgagcgtatgtttgaattaaagaaagctttcggggcttgggggcttgggggcttggctttttgtttgattgtttgttttagccaattttaaatcttatgtgaagttacctgttttagaatttgctcttaccctgatgatttaagtgacagataagcgttaaacccacaagtgtgtctgcgttgattggctgttagaaatcgggatcttgaaggaaagaagagttacagcttgacaatatcagctcttaggagaggtggatttccattaaggcaaggctaaactaactctaactcagaaattgtactttgaagctcctacattttgcagtgaggaaaaagtgaacagattatgaagttgtaaatcgatctggggctaaagttaaagcttaagttaatgaaatttaaataaagattcagttgtgaaatacacatcccacactcctgtgagcagattctcgtgtatttaagttgggaatggccttgctcagaacagatgtcttagtgtatgtctcggggctatagtcatccaactctgatggtagtgtgcagagagggctgagaagtcatctaactccaacaggccatgagtagaatgatagaggccatgagcagtaggacctgatccaccctggatgagagagtcaggatggatctgcctagaaacccccagaactccagccatcttctctctccagaactacaagtgcacagacctctctttcgcccagactgtgtttacaggttccagcagcagcctgaggaagggaatacaagcattcattgtttcctggcagtttacatacaagaaaagtgaaacatgttgatgcgtagcattttagagtttcttcctcttcgttggtctatcctgagctaactgctgcccttcttgatctctttgtcccctgtgcttttcctcacctggacatcccgtgtcctttgtcctagatctgggcatctctctgaacatcatgttcctgacctaatctatgctgctttccactcaccttactgtcatcgtgatgcccgacacttgcccattgaccacatccttgtgtgtaaacagaaccgtgtcggtttctaagtaggcctttggtgagggctgatgactcatcaagaccacaagtgacgggtgaggttgttagagctcttgcttcggaagagcagaaactgggcggcttcatcccagtgcaatgtatcctcccagtaatggaagatggaagtacaaacactggcatctgcaggttcctcctggcctctctgcaaacaggaggtagtcattccctgagttgtgaatgcatttctcctgactgtcattctgcatctcatgggtcatttcctcttcccctaaggatttgggcataatgtaatgtgtcccccttgagtctaacaaataacacttaaaaaaaaatgcaaataacagtctataattcttggtgagcatgagtttgggagagagcatctacacaggagtttctggtgggtagtaggcccctcaattcacattgccccatgtcttcatctccctccacctactgggtcaacaatgctttattatctacattctgcggagtccacacatacaaaggaaagaaaggagacattgctttacttgaacaagtttgagtttcattccataaggacatgactgtgaagacagggaccctcagttgtacactcgtgaagtttaaaattgagaaaaatatcatcatgatatcatggtttcttctgggggttaaggagtaggctacctccatgtaggagtgattatttttacatatttcctcaaatatacctatcctagcccctccacagtagtctaaggcctgcaatatatacaggccacatggctaatcaaaaatttgaatagacagagctatcaaactgaattaagggatcatccagtcagtttactatttttgtctatgatgagaatattggtaagccaatggacttatcttatctaagtgttaaaatatccctgtttggtttgccattcatttttacatctcatagacgtgcttgtgttagaatgcagagccaggcttagtgacacgtgtttaaatacgttatttgccttttccctagcacacgttgatcagcattaagacagctgtgaccactctgggtgtattacgagctcttactgctcttcctccacgctttagagacttccctgaaagataagtggagacaattcagcgatttctctatctatggaagccataaaacctgtgctgaaagagagagcatgcagatgactgccttaacttatgctaatgtgacattctctttctcctgggctagacctgtcccatgtggccagtagttacaccttgattaaaaagaattctgcaaaactactagattcttttgcatttgggtttatgcctaacagtgtgaacccacaggtgtttgggattttactgtacattcagcgatgccctttcaatattatttccctcaagaaaattaaaaccgtgcaatctctgtatgcactcggcattgtaattttatgatgagataaaaatttatagccccctactacagtgtacttatggtcttgaaagcatgcatcaggattcttccccaaccccctataccacgtccataaagaagaagttgtcatcccagacatgtaagcctgggtcctgtactatttgttattgtgatttcccaggccgttgccagaatttgtttctagcatgttgcttgctgatggtcacggagtgaggataagaagttgtttttgatacaggggctacctgtaaaatacctcaatgcttttcttctcctcactaaggacgtgttccctcactgaataagcttgagtctgaaaattaccccttgtttagagttatactgccacccagatcttcccccagaggaaaatctttactccactgataattctagtgtgttctagatggtgtcatgctgattcaaaccaacctctgcactcttgacctcttgacatgggtggttcattaggaccctttcaacctgctcaaccttgcaggtgcacctgtgcccagagtgacatttatagcttgtgccctgggttttgtctctgaagattggtgggagacaccgtgtacccaggaaaactctggaagtgaatctgtaaatcaaatgacagaggagacagacaaatcaatgggtggctactgctttttttttttttttctctcctcacttttttttttctccaggcagaaatcccagacacaacaatcaactctgtctggtctcagcaaaactgatgctattaaaggttatttgatgaaaacattttgacccatgtagaaagagcttaatttacaatctacatttgttcccccctcttggtcggatgtttttaaaaataaacattagcctcagcaggacctactgtcttcttcctccatcaaattttcctttgaaggttgtcctcagagatgtagtggtgaactgtcctgagagatgcttctcttctctctccctccnnnnnnnnnnnnnnnnnnnnccatccctccctccctccctccctccctccctccctctgctcactgttgggtaggacaaatgcagggatctctggactctctttctttcgaacttcagcatgtcatctcacttttatggccagataaaaagttataaatatggatctttgagtctcctaaaatattgacactttcctgttaataccttctccttaaaaggaacacacgaactgttcttgttcacctcagctgcttcaagttcaccatccagatatcttggcatggagatgatgactcttcatgttgtccagtgttcattgtgcccatcattaactggaaccaaaaggaaatactaaaactatcagaagaaatcacttcttggaaaaataataaaacctgtcatttttgttactttactcagtgctgtgaccaaacagctgacaagaagcaacttcgggaaggaggggatgagataaactcattaattaagggtgttgttgctcatcctcgggaaggtgggagagcatctgtactttgtaggcatgagagctggcttacatccagctgagtcaagcagtagagagaacaggaaatgggagcagatagagtaccccaagccctgcccatatcaaggtagcacctccccacacacatctcctctccaaactgtgctatcagctgagcacacgcgttctgaaagaagagaattcacagataccttatattcaaacctcagtgccctgcttataattttggcgagaaacagaacaaacacagcagcccaccaggggtcaaggtccttgagacaaactgagtagaaagctgcagccgtgcatgaaaaggagccaggcgtatttgcctttcctgaaaatgatcatttatttattttgctaagccagtcttcacatatattctggcgtgatatattgaattcacaagtatgtctgcaaagttctgcatttttatcatctgttaatcctaaccacttctccgaggatattttgcatcttgtaaataacaggatgcagggagggagtagggacgtgaaggctgtgcagatttacttctgtcccataaatattgatgatcttctgagtgccaagctgggggacacttataactcagtgtcctgggaagatggctacccaaatacgtgatctggctgcctctcttgggagcttcagaccttcaaagggctccctaccaccttctaaatactcactttttcttagctcattctgaaagcaaaatcgattaaaaaataatttccatttttataccacttttaacttttagcgaaaaaggaactctaagggtaagctgaatatctctcatccaaaatgcctgagatcaaggcatttccaggttcatatatgtttcagattttaaaattgcacatagaatttactagttgagaaactgtaatatcaaaaattcaagatgtaaaatgttttaatttttcttaattcttgaaatttttgtattttgatcatattcactcctacccacccaactttgtgttctcgctgtctctctgtctctccctcccttccttcattcctccctctctcccttcctccatcttccatatccagaagagtcttgtttgtgttagcaaaccattcttagctgctgggcctactctggagtgtggtggacatattggagatcaatagcattgaagaaaactgattcttgttccctcagaatccatcaaatgtcaatagctcctcagtcaggagcgactgcgagccataggtaaggcatctatgagagccttgcaagagtctgctcctgatgagggaatctcatgagacaacctccgttctccgcgttgggactctggactgagctagcacaggtcttacacgtgctgtcacaactgctatgagtttgtctgtgcaacttccccatcataacctgaaaatactgcttccttgatgtcatctctcacctctggctcatgtcattttttctgttccctcttactggaagatttctgacccctgaagtgaaggaattgatatagatgtcctctttagggctgtacgttgtcaagtgtctttttttttttttttccatattgaccagttgtgaatctctgtctaaaaccaaaagaagttcatctgataaggtctgaagatgcactccttcatggttgtagcattgtgtcattatgagtcattttaatatcattttcatttaccagaataacagtggtagatttttcccccaagagtccatgacctatctagtctcaggttcttgcctaattaacagtgccaggtatatgctccatcctgtggagtggtccttacacataatcagaaaatggttagttactcccataatgtttgtgccaccattacactggtgcgtgtttctttccaggcaacaatagagtccttcattattgtaattctcagaatccagggctgattgaaattgatgaattcctgtctcccccggtagcatacacagcaccttcgagcacaatgaaagcttccagtagagataacacttcaagcagcctagtttctctgtgttctgtgacccaagcatatagtgtcttaggcaatagagtcttactgtcaagttctcgagggtaactaagagtgatggaaacaacctgtgacctgttgggggcctgttgtgccctgttggccaaaaatctgagaagctccaaaagatgtaagccgttcttggcagtgagcttctgagtttggatgagaatgaccaccttggggaccataattgtccatgaatgaatcaaggactgttgttcctcaaaggcatatcagctaccagttttgcttctctgttaacactcgtgttagcattaaatgagactacttaggttcactcgttaggagcagacatacactgttggctcttatcatgccttacctatggcttgcatgctggccttttggccaatctgtccctaagcttatctcccctgagtataaagtaacccgtgttttccattgtaagacagatgttccaggtggctttgtagttcttgttctccatggcatggtgtgtgttgtcaggatttttttttttctggcaccaccttttaaagtacattcaggaagtataggcctttcctgtgactggataaaaaatgtagacaactccaaactctctgctttggctttcactcacagattcaagttcagttgtttttgtaatcaaacagcaaacatccacgaaagctgagctgctcaaagaccttaaatacagaaatgcttgtgaccattctgtgcatccattcctcttgatttccctaacattgctccctttcctctggacggttttctgtggtcacagtggggtttctgcacacagatcttcagacagcctagattaacctgtatttctgtatcgttaggtctctgatagtcaaagtcgactcaaggcaatagctattgcatatggtaccatgataaatatgagagagtacaggaatcttttttggcataatgtttttattctatttagaaatatacacacaacaatgggatggacacaatatagggcgattctaatttttgcttttgaagggactctccatcttgattttatactgcttttcctaatttacatcccaaccagcagggagcaaagggcctgtctcagcttcttgatggtttttgagttgatcttcctggggtgaggtctgactcgcatgtatctagcttttttcatattaccattgactacagctttttcccaagacattaaaggagtgatgactctgaaagacgggcacaaaattagatcattaagttgagagtaatgaagatacaaaatacacacacacacacacacgtatattaaatacagtacagacagacttgtacacatgcaaaaatgtaacatggactgtgacagccgcacatgttagtcttcccaggtccaaggtgggatgttcttacacgctaagctgtcactgtggggagctttatagaggaacttttgacttttgacacttcaaccacatggaaatgtcattctccagctcaggaacattgcataataatgtaattatcaatttggcttggccttaacatgttgacctacaaaggcagtagacaagggatcagcattcagcctattgtctatgtgtgcacctgttctgaggcacctcaccaatgaggtgatggtaacagggaaggaaaatgaagagagcccatatctgagtagagaatctgtacgtgaaacccaggactccccttgaagctagtgcagtgatgtcagtgcccagaggaacccattctagtcctgtgtgtgacaagagctgaggatgttcatggcagttaaatgcagtgtctgcagctcgtagctcctggctgttgcttctttcgatcttttgtttagatctctctgcccacttgattgaattcagggaatggccaggatatcttgcaatgcggtctctcgggaatgaatctatcagccttcctgcaccctgattttgtttataccttcaagaggcccaacatttttactcgagcacttgattgtcatggctgcattcttggctttgcttttctgtgacctacacagctgctacaaaagttgaactcttggcaccaagaccagcaaagacaagaacgccttgggaactgtcaaattcgggcacggtacggtcttaaaagaaaatatattaaaatttcaaagagaacaacatgatttggttattacaagaaatgtcaataatctgaggctaagagatttaccagaatgggagcagtcaccacccagatctcaaggagatatgggaagaaaagacaccatggggttgtgggaaatattaaaaagaacggcaaattcccatgctatggtgggcactggtgggccacatgactccagtgtggtgctcttatctcagcagactctctggcctggagctcccaatacagctccacctaactccctaagttcccttggcgggttgttgccacatgagccccatgcgatgaccacccacctcaagattggctgtcacaactcccagtaacccggtaaaatcaaaactctagaaggttataattaatcagtcagatttatacacaataaattctaaattcacaagatgccctgacaataatttcagagtcaactgataatgatacaagctgcccagctagatgagacaagttatctcaattattctatccttatatgatattatagctactggtggctatttaaagccactatgaatctgaatcctaggacaatcctgttggtcctccattttcctcctcctcctctcctgtgtcgctccctgtctctgcaactcttagctccacctcccttttctctgtccaatcacaggcttcttgttgtattaataattaaattaattggacagggaaaatcctgctacaccaggggccttgggcatttggggcagatgctggaagctggagccatggctcctgtaaccacgtatgtgttccagcagcaggttctgcttggctggggaggaaggtgctgaccagagctgctgtggccctatctcttcccaccctatcccagatcctggcttcaggcagcacttctacatggccaccagggcatctctaggagctccactgtctagagctaagtagactactgatggactagaggcaaacatacacaggagaggacaagatgatgtcctggcaaagcaaggagaacatgtgcagaggtccagcacttgaaaaggcaaaatggcaaaactgatgcagagatataaagacaagaaatctcaagaggaaggaactagggtaatgccaaatttgaacactcgacatttcccaaattttataaatgtgtgctttacgagagcactaaactattgaatggaacttaagacaaattttatttttaattcagatcatttcagtccaggtacatttttgttattattatcatcattattttttttaaacagatctcacattgtagcacccaaggctggcctagaactcactacataaccaaggttggaactgacggtatagccaaagttagctttgaactcataacaatcccactgccccagccttctgagtgctggattacgagtgtaagccaccacacccagatggtagttttattttaatagattttgctcttggtcacactaaaaacaaattgaaaatctcaatatgtccacttaccatatctatagaagacctcctctcattccctgcaaacagtgcatttatcagcaatctttgctaacaaaataattagactttgctgtgaacaatggttggacagaggagaagtgaaggcatggggagtgattcacctatggctagtgttcagccccaggactggctgtgtattgaccatggaaactagcatgggaatccccccttcctaatgctcacttggacttcatcacacgcttgctgcttccaggctctccaccctgcatctctgactgtgcatcggaaccgactggggaggaaggggcaagtgtgtgcttctggcttgcctcccagaagtggtaactggggagtttgggtgagatctggaagatttgcaatcgcatgaagaattgtaaatgaagactccggctgatgggaaatctggaagccgttttcagaaacgctgactgtaccagccccatagttggcagttaggttgggccgtacccccatctttgtaccccttatctcattggtcccatgcaggcagaggaggcttctggtactggctgacccctgcccaaacttcctcaccagatcacaacagccagctactctttaagttcagttcagggagctatatctgtgtgaggagagggagccatggtatggctaaggcccatcttgccttgcattcctgtttccttggtgatgagccaagctcaagcttgacagccatcgcttaggaggaaaaagcatgtttgtgtctcagtgttccatgatttttattttcatcgtggatctaggaaaccaggcaacaggatgagctgtgattcacagccgcgggaagactcccatacctccttgttttaatgtatggctcacataatttatcttttaattgtatttattgtggtacagcaggagtattgtagggagtaatccaacaaagcacacacacacacacacacacacacacacactgtccaactctccccctgccaaacccctcagcctggcaccatcacagcagggttttagcaactgttgcttgcagccaaacccaaagcataatgctaagttttcctttgagtaattttattgagcagaatcattccaaagagaatttttaaatacatgatgatttccttaaagatttttttgttctgggctgtgtgcatataaatttctctattacatgcatgagggttgctgctactcccagcatgaagcttgtctttcagtgtctaggagggagaaagaaggaaggcttgaggacccattatagtaggacacggagggagatgaaggaattaacctggcctccgtcttctgctttccccacctctctcctttatctaccaaataataaaccagaggaacagagccctgggcagaacagctaccttaacagcccaggaaagccttctgcctaaaacctctctgctgcctcaggtgggtgctgccacggtgacaacacatgactctgttcccctgacaaccagtcgctaagctatgggtggtttctctgatagatttttacctgcatagaaacctgtccaccttacaaggctttgagatagcctgcttttatactgtctgaaacccagtggtgtgatccccacaggttccctcgtcttcaaggcctcaatcgtcctcctggtcccctagttctctacagcttcactctatgtctttttcaggtgaatgtgatgccttgggctgatggcctttcttgctagtaacatggctcttggtgagccgcaatgcctgataccttccccggaggtttgttctgtttagatacaattctatcacaatgttgtaaatgagtttcagctgatacatttttttaattaggtatttatttcatttacatttccaatgctatctcaaaagtcgcccacacgctcccccacccactcccacttcttggccctggtgtacccctgtactggggcatataaagtttgcaagaccaatgggcctctctttccgctgatggctgactaggccatcttctgatacacatgcagctagagacacgagctctgggggtactggttagttcacattgttgttccacctatagggttgcagatccctttagctccttgggtgctttctctagctcctccattgggggccctgtgatccatccaatagctgactgtgagcacccacttctgtgtttgcaaggccccggcataaggaccttgtgagtcttcttgctgggcaggcagcttggggtaacacctaactgggagccaggagaaaggcaaacgggaacagtgaagtttcacattgaagaggtccacagagagccaggctgatgttcccatgggcaggttctgaggccaggcgagcctccctactcggagatctcagaggaggacaggattcagaaggctaactggaaggatcagctcacccttctcaatgactgtgagaacaaccgcacaccaagaagcaaaggaagagctaagcagccgccgccaacagggtgcaagcaaggtttataggacagtcaggacacctgaaacatagctcacattttctaagaccagagaaatccatcagtgtagaccatgtgctgaatggaccccagccccaaattcaaggaatcctgaagcctgggggacagagaggaggttcacccattgtgatgcgatgcaaagcaactggaaatgaactagaaagggcaaagggaaaacctgcagatgcggtgtcccccaagtcccctgccacaagcagcagccattggatactctgccactaaacagctccctctaaataacacatcatgcaaaagtgacagaggagagtctgaagaaaatttgtgtgtatgtacacatataaatatatacacgaatttatccatgaatatctagatgtatgtatatatggctggctaaatatagcaacatatcagtagaaaggacttttgataacattttaggctcacctgctagggaatacagaaatcttgaaatctgtttaagtctcaaaaacagagaaattagcacttttttgttgttgttcattttataaatggaggtggaaaggatcagagaggagatgagggaaggggaaaaccaaaatcaaaatatattgtatgaaaatatttttaagcaaaaaaaataataataaatgaagaatgaaaatcaatctgaagtaagcaaatggcagccaggaaggaagctgagcaggtaagagctgctgattcgtcaaaggatctgagtctggtatcccagcacccaatgaggtggccacagctgtctgtaaccaagcccagaggatccatctcattttgcctctggcatctgtgagcacctgccctcacatgcagagatgcacacccatctacacataattaaaaataatcaaaatgaacctttttataaaaatgattggttatttgaatatatggataaaatgaaagacttcttagtaaggttgaccacaaaaggatgtaaataaccaatgtcaagaaaaagatagaaagtatctctgaggccctgccagcatttaggaggtcagaaggagcaggagtaaccccacatgaggtaacagttgggctagcatggactaattcctcagaaagctcagctacctcacctcaccccgtgaaggagatcgtccaacgggccagtccaggagagtctgaaaatgcaaaattccccaaaaaagaaatctccttcttccagatggcttaactgtagaattctaccaaatgttttaaaagaaaattagtaccaacttcatgcagtctgatccagaaaatagaagacagaatgcttactgatttgtttgacaaagctagcattgccctgcacccaaaatcagaaaaagctaaaacacatacatgtgcgcacacacaccaaaaatcagtccttcaaaaactaaatcggatagatgttcaaaaaaaatagcagaccagattcatatatatctctgtgtgtgtgtatagtataatataatagtgtaataatgtatatttttactatggccagtcaatgctttccaaaatgtaagtactttcaatatttgaaaattattcaagataatccagaatattaataagctaaagaagaaaaattatgtcatttattaatgggtgcagaaaaaaaattcgataaaattcaacatacatttacagcaagcattctaagaagacagctgtggaggagatggtgttgcaccaagaaggagcacccacagcagtctattgctaatatcatatgtaatcaagtgtaatcctaaaagagacagctcctcccatggaagagcacctgcagcagcccactgctgtatgtaactgtggaaaccaggtgttgtactcttaaggtcaagagcttggcaacaatgctggctgctgtccctctgggccacatggctgccatcactctgggccacataacattgtaggttctagtgaatctagtgataataggaaggaaataaaagattgacagactggaagaaaaacatccctgcttatacatgacataaatgtcagtgtacaaaaccacaaggaatccattcaagagcaagaaaaccatagcagaaattaacatttcagttaggacatagtgcatagcaatagtaaagacgagcctgtgacactgagagggagtacaagggaaacgtgggaagagttggtgaacgggagggtgggtagaaatgtgcaaatacagtgcccgtgtatgaaaccctcaaaagattgaaaatttaaaaaagatcccagaaaaacataaaaatgtgttcagttttaatgtcagtagtggacactgaaattaagcataattactttcataaccactccaaaataacacaatgctcaggtctaatgtaagtaagtctcattaaacatgtatggaaagagtgattgaaaatacactcttgtgtgtgtatgcatgtgtgcgtgtatgtgtgtgagcatgatggagcataccgtgtatgtgtacatgcctgtgtttgtgcacatgcatgtgtgcacatgcgtgtgtagatgtgtgtgcttgtgtttgtatgtgcatgtgtgtgtgcatacttgtgtgtgtatgcacttgtttgggtatatgactatgatgaagcatgatgtgcatctatgcatatgttcttgtattatgcatgtgtgtgtatatgtgcttgtatgtgtatgagtatgatggagcatgcctgtaatgattctagtgctgaggaggaagaagcagaaggaacatgagttagggagaccttgcatcaaaacaagtatttttgtagttgtagaagcataagccatcttactgtaaaatgtatatgggaagatccagccactagcatagctacaatgatgtctgtagaatacagtaggaaggattacctaactgtatcacatgacatttcagaactttgtactaaagacagtggcagaaggcaatgctctccaccaaacatagaacccaaaagtagacatacaaatggactgagccgttggaggggatttatcaagggaaattctaaacatgccatccccatgctggtgttaatagtctatagtctcgcctcattggtcagtttcccagttttgatcatattataggatcctaccatgggagaaaactggtcagggacacatagaactttcctgtattatttcttgcaaaattatggaatttgagctatactaaatttaaagtagtaagttgtaatatttgaaagtatagtgagatgttatttatgccacaaacatcggcattgatagatattttgccttgtatttagacttttattttaattttgacagcatcatcctgtacacggaacactataatcacagtcacctgttaccctttttagtcctctccactccagtcagccccttctcaccagctgatccctgccctacccaactcttctctcccttccttccttcnnnnnnnnnnnnnnnnnnnnnnnnnnnnnnnnnnnnnnnnnnnnnnnnnnnnnnnnnnnnnnnnnnnnnnnnnnnnnnnnnnnnnnnnnnnnnnnnnnnnnnnnnnnnnnnnnnnnnnnnnnnnnnnnnnnnnnnnnnnnnnnnnnnnnnnnnnnnnnnnnnnnnnnnnnnnnnnnnntcccttccttcttccttcctttctatcttttcttctttttcagtcttttaaaatttcaggccctgttcagcagtcttgctgctgtatggccatgactgtaaagaccatgtcataaatagaatttgtaacaccaatacaaaagcaaactcattaggtggaattaattgtcttcatgcagaaaccaaatttgtttgcgctttttttttctgttttttgtttttttatttttttttttttgagacagggtttctctgtgtagccttggctgtcctggaactcactctgtagaccaggctgacctagaactcagaaatccgcctgcctctgcctcccaagtgctgggattaaaggcatgcgccaccacgcctggctagaaaccaaatttgaattccggttgtattttaggattaaaggatatttttaacacatcttgtgtatctgcatacacgctcacattccataccaatgagtatattttgatgatctttgcaaaatacataaaaactatagccaaaatgacatgttgctgtgcagcctccatgcagataagtgcctccaacttggttttcccactgaaatatttatctgtgccagccaatcataagtaacaacttggccacttgtatcaccatactggctataggagtgtctagtgtttatactgaaaagccgattcaaaccttgtcagtactggactcatccatttcttagcagctgaggttgtacagaagttgacttatccctgggaagaggactcaaagggcttcacaaatttattccatacaacaaaaagagataatcccacctacactgtgatgcagtgtttcgtgcaaaagtacttgccataagagggaggagctcttctaactacatactctgtgcttcctataaataccaagctatcactgaatgctggcatgcatgcgttgatgcgtgcgaagtatatttttctagggaatgtaaccagttaggatctccatcagggaaactatgaacttcagttttagtagagaccctacagtcttaagcctgattctataaaccaggatatcatgcatggaaacttaccaaaccctatgacctcacaatggcaaaacacttaacctgtatactccttggaatacccttgcttggtgtggcattcccactcacaatgtagcaaagcctcttgtcagtttcactccagaggcatcaagtgtgcccaatggacaaggggtttgttagttgctgtggagaatgaatgaatcagcaaacagccagaccctccttaggcacaatcttaccgtggaggttagagagacctacatgatattagccaatgacaggaacaagaaagaagaaaataaatgtgcttgcagagaatcatttaagtcttgtgtatgcgcatatgtgtttgcgtgtgtgtggggtgcctctgtgtgtatgcgtgtatttcatttggaattattagattctcatgtagcaaatagactggtattatagactagaaccatataataaagattcctacatgccagcatcccagtggttctgtgtaaatggtattcccatctaacagtggcgttgccatgaattcagatgagaatatagaagtcagaaactaaattttggtctttttcttattttagttattatagtactttgtactactgacaaataatactatgaataaggtataaaaaagtgggggctgaagaagcaaactcaggggtatagccaccgtcagaaggcagggacaatcctagtggggaggccatcttggtcataccaaggtctccttcttagtagagcacaaacaatggaacagaaagctgtttgaaaaggaagtaagagcccagagatgttttggtatgagagtcttagcttttcctggaaatcaagaaatactgtcagccaccaagagggcatggaatcagaaattgttctgggaacttgaagaccaggtgaagtattttgacagttcctaggtgtgtgtacattgatgtgatgtcattaggaggtgcatcaggagactcttagcagacagagttgatcttaaagctcagcatgggactctgggtacagaggaccccttcttacaacaagacttgaaggctaccctgtccctgctctcactgccaaggatgtggaattccagcacctactgctcctctgttcagcttgaggttcaagacctcagagaccctgagtgaagcagcttcacagagctctgggagagttgggagtctcaggagagatgggggaaagttcagagatgccatagactgttagagatgagggttgtagtttaaatacccagtgatggggtactgccaagtgtgtacagcaagagcacatgaagccaggaagagggtgttggaagagggaaatgtagatgcaatcttcacaaaaaaacatcaggggtatctggaagggaccttagggaacctgggaagcaagccaaagctgtacctgcttctcagagatgttggaggttgtgccaagcgaaggagagctcaactgctgttaagttccttaaaatgggttgaagaggtgacaagcaatgtcccatggggctggtcagatgctacgtcagcgcctaagacttcctgtctaacatttggaagacctgaagctcccgtgcatccatcacagacttagcagcacagatggcacctaccactatcctgaatttttttttttcagacagggtttctctgtgtagtcctggctgtcctggaactcactctgtagaccagactggcctcgaactcagaaacccacctgcctctgcctcccaagtgctgggattaaaggcgtgtgccaccacgcccggctatctgaaattttaaaattggaacttggggacctcgaaggggttatcaaagtccatatgaacccaggcagttgtaaagatgaggggacctgacttgcatgctgtcactgggctgacctccctgatacagggaagacagggaagctgagttcttgcccagaccagtttgtctccacactgtgcaattacaggtctggtaatcttgttccatggctgggggcttgcattgtgggatgttcaaaaatgtgtctgctttgtcaggagagagacagagacagagacagagacagacagagagagaaacagagagagagacagagacagacagagagacaaagagacagagagagagaagaaaaaggtgctgagattctgagagtcccaatcaagtcatgaccacccctgctgagaaaggcttctctgcagtagaggaagctactgaggtgagccatgtctgtctaatgatctatagcatggtaccttacactgtagcgtggtaacacctgtttgggagtgggcaactggacaaccagctttgccctcacttgttatgtgaactctgaaacctgatggtgcttctttcagggatctttaaagaccccccccccaaaaaaaaatcatgcttttttttcccaaagaatttttcacagtcaccttttatccttaagtaattttgctatttttgtctcattacaggtcatgtatgaaatgggaggagcagttgaaagaaacaaagactctctttcacagaacctcttatttgtaatgaaaagtaagtcgatttttctcctcacactgatttcttgatcttgggacagtatcctgaaaaatgcagtctacagcctaaagggcagtttgagtaccattccccatcccaccccgcagtgttcaggatagcaaggggtgtgttgccacactgagcattgactagagtctaattgggagtccagaggaaatgcaatcttcactaagcttctagcagacaggcatgtaaaatgcctttactgcatccgcgtatgaatacggacgagcttgtctgtggagactaatgaagacgaaatcagcttccgaagttatttaagccacagcatggtgagttccatcactaaagatgactctagggcaaaactagagtggtattttatttttatgtactttcagttaagagctattaatgtccactaagtagaaagctgatcaatgtttatatgtataaacacatgcatatatatatatacatatgtatatatatggttatatatagttattggttcctacttagtggatattaatatttcatatacatatatcaactataattctattcagtatgtaacactatctcctaacatagataccataatcagatatgtgtgattctgtctgttctagtaatcattttcttaatagagtctctggtgactcacatttctctggtagcctcttcagggaaaggttgagtctccctccggctgaggcagtcatttgtctttcctggaaagacaatctaggcttggtgaagtggtcagatgctttgaaatggaggtcagacatctgcgtcaccactggctgaaggcgtcacctgcacatcacagcctgtggtcgtgatgcattgtttacacaggggccctctctgcgggcctctcagtcacgcagcttttgtgaattctcttggctgagatgctgcaggggaataggaggagcaggggtgaaatcccaaagggctggagcctggaactgctcagccttgctcaccctcagtgagggagggcaccagcgtcccactgccgtgacttaacttttcactgttaggctgatctgtctctgtgtgaaggtctgagacacagagcttatcatagatgttatcactttgttttagttttgtttttcctggtagtaaggacacatatgtacgtaaaatgagaaaatggtgtctggggactttttttttttatcttgcttgtcttatcaaatgcctgtatctcaacatcttaaagcctttcttttgtttgcccatgttagcaagttaatttgatttcaagaaaacatgggtgaaaaccttagtcctcagcaggaggactgagtatacagtgtgctctcgtatagtcatgattcttatgtgaagtggtggatgctttctgtgcagggcacagaccgtgtctggctttgggtctccttagaggtacttagcttttctggggaaaacagaacagttccacggatcgtgcaaagccacagcagtgctcctttagcacccagcatagccaccacaggctcacgcacctacacttggcctacagaagactgtagttactcacacccctcatcagactgctgtgatagtattgtgactctgcagaatgttagggcgccatggaaagtaattaggaggacatagagctaagaaacaatggctttcaggacagtcttcttcacagtaggatacccacttaaggacggtggaggtttaattttgaggaaactagggacctgcctttgagtaaggtaagcaggggctctactcatctgggcctaagaggagaagtaaataaaacggcttctctcagaagttcactcacccaggcatgagaggcatgaggcaggcaggatacctgtgaagtccactttctgctggcactcttgcagccatgggagctgaggggacatccccagaggttcccatctgtgtcaggaacatgctggtccctgccacatcaatgtgcactctggtcatgtgacttagagagaagccagaaatgggtcaacaaatgacgtgacccatatttatgtatagtattttagacatttcacctttataagaagacattatcatttatatatgggtcctccccacccctgtctctctcatacacacatagacacacacacacacatccacatgcaaacatacacacatagacacacacacaaacacacatacacatacacacacacactctttaagaacacatggtacttgtttaattattatatctttaaatgagtgactcttacgcctatattattatcttgaggcggttccaaagagcaaaactttaagcttaaaagttttgaagaattaggatttccaaatgctcttctcacagatgaagatttttgtctctgtgtccactgctcctctccctgtgttttctgagacacttccctctctgtgtccaaacatttaagtgtgccattctaccacgaatgtcttctctacttggtttcctccccaaattccacagtttcctctcaggtgtccctaccacagtcacacttctgtcctatgatatctctttatcttcctacttgttcactaaaatactgaattttcactgaagatattacagacagatacatatagaccacatgtatgcatgtacatatacacatacatacacacacatacaccacatatgtaaaaggtagaaactaacttgcttttctggtgaacattgtgaaatgtcaatcctaagtacttaagcaaagcatttcaagttttaattttgcaatcatgttcaagatacaggcactgttgttttcattgtggtttaaaagccacttgagctcagaaagtatctacacatacactacagtaatggaaggcccctcccagattcttagccaacacacacattattgtttctatgcgattcagaatattcctaatccaaagcccacctgttggagctccagccctaccttgaaaagtcggtcaaggtctcgtaactccagacttttctgtatgactaacctggtgtctgaatggtaccaatacaccttgcttctgcagctggagagagagagagagagagagagagagagagagagagagagagagagagagagagagactctttagctactttagcctaatgacagatgcaaccaattgaggtggagtcacccggagtgtttaactacttgctccgatggaggttagcactggtgcaatgtcttcgggatagggtagttattttctagtaatgggaaactagagtcaaaactcatgcttttatgatggtgtcaagtgcacagaagcctgttgggtctgacctggtaagattcagtgctgacggccacgacaggaggaagtctactctttagagagccgtgagccatgagttggggttgagaagctgtgaccaagactcaagccaatggcaagaagagtcactgtctgtctggaaaactgaatgctggtggaaatatcatagatctggggggcgggggagaaggagactccactgtccacacagagtgagaaggagcgcttccatagagtgagcccagcctctgcagtgatttttaaagccatttacaatgttcatctatttctctcctagcaagtgaaaatgtcgtgatcagtcatttgttccagtcaaagctgtcacaaacaggatcgctcatatcttcctacccatcctttaaatttggaggacacaaatccaccctgcttagcaagagaaccgcctcttccatggttggagtaaataagaattacctggaacttagcaaggtagggattccttgttcctgcttctgttgtctttactctgctcgggcacaatctcttccctccttaaaggcgcagttttaatacaatgtgaagatgctcacactctaacagaaggaattgaaggaaagaggctgggtttgggcacaatgggaagatagtcatgttctgacagaaagaattaaagggaaagatgtgggctgcttgcctttctgttgcagaggagaaaagagcttagccatcttacactttcaatctcatacatcactgaaggaagtcagggtaggaactcaaggcaggaacctgaagcatagaccaggaaggaatgctgcttgtttgctctctggctggctcagttttttgtacagcacagccacttgcccaagaaatgatgtcactcagtgccttggtctatcctgcactgagtgagacagcctcacagaccaacccaataatgacaatcacttgacacctttgtttgtttgccggtctgttttgtttttgttttccaggaacccctaggctatttcaggtttactgataacactaagagaggtagtgtcttaggttctaactgtgatagaggacacagaaagtttcagtattctgaccattagtgtaaacagtttcatagcgatatccgcagttgtctctgtgacatcctgctcaattttttaatctcaatggccatctttttggatggatgttaaagaacttcagggtaattatattagaagagataaacatagtatcttatcccagtgacctgattgcttccaaggttcaggtctggaaatgataaattgacatttcttttattttcccaggaccggaatgtttccactgtttgtttgtagaccttgagcttgcgtttgtgttacatcaactgtcagtgtgcctcttccacacatgttggatttatgactaaaggttccgtttctaaaggagaactaaaaccccccatgccgagttattccaagtgctgcggaaatgtccgtgcactgctttgtttcttaagaacacaagagcaaactgctttaacaaatctcttgcttatgtttaccaaaatacacagtaggagatgcataacttggaaggggttgagaacaattgatttttttttttttttttttttttttggttttttcgagacagagttttctctgtatagccctggctgtcctggaactcattttgtagaccaggctggcctcaaactcataaatctacctgcctctgcctcccgagtgctgggattaaaggcgtgcacaaccacacccagcttcaattgattttgaaaatgtagttactgaggcaggttgaaatatatcttagctctccagttcaaaggaaagcatggtttaagatgctgcccttccaaaaatgacaaatgtgtgggagtatgtgtatgcatatgtgtgtatgtacagatgtaatgtgtgtttctgtgcatataccatatgtgcatgtatatgtgaatgcatatatatatatgcatgtggatgttgtgtatatgtatatgtgtacataggtacatgtgtgtgcttgtgttgcagtgtgtttgtgtctttgcacatggtttgtatgtgcacatgcatatggatctgtgcctgtacatgtatgtgtatctatgtgtgtatatataaatatttatagatatgtatgtgcatatatgggtatgctgttgtataactatgcatatgtatatccactctgtttgtgcatacacctgtatgcatgtgtgtgcctgtctgtgtatatgtgtatttatgtacctgtacatgtgcacttgtgtctgtatgtgtctccctatgtgtatgtgtgtgcctgtgtatatgtgcctatttgtgcatttatgtatgtatgtatgtatgtatgtatgtatgtatatgtgcatttgtgtgtgtgtgtataagcatgcctgtgtatatgtgtgcctctgtgtgtatatatgtatgtgtatatgcttatgtgtgcctgtgtgtatgtatatgtgtgtttgtatatgttatgtgcctgtgtgtgtgtgtgtgtgtgtgtgtgtgtgtgtgtgtatgtgtgtatgtgtgtgcatgtgccattcattagtcagcagaccctaggatcagtgacccttagttacgttgtagaactagatgtgtcaggaaacccatctcacagcctagcaaaagccacgtctacattaagaagccaagggttcccttgtggaaagcttgattccaaggggcttttcatccagacatcagaagtaagaactttccatacacctaatctaaactgtacattttaacctcagttattaagcatctgagacctggccacctgtagacttttccctggagcactggagaggagagataattcgcagtagcaagctgcccagaaaaagagaccttgtgccccacctgtggggatggagatttactttcattatggattccttaaatgctctcttccccattgccctagctttacccttcaacctaccccagcccttgtaatcaagccctgggccagaaacatggaattttacccattccttaactggacatgacactgggcattggatttgtggaaatgggtagatgctggccaagtgcttcattttgcattcccttgttggccacaatgaatcactgccctgaatagttcatcttaatggaagaaaatgagctgttgtcctcatggtaccaaacagatgattctgtcttattagctactgtcttcatggcactaccaaatagatgattgtgttttatcggaattttttcttccatagagttaaggggaattggtttagagcagtggatacattagtctgccccatcatagttctgtgaaatgcaacgtggcatcgtttaaccctggtgggtttaattaattacctcttgcccttaattcttcttcattcaacatcaccattttctccatcttttaagttttttttccattatcacttaatctttgctacacatttatttttcttttaagagctgcttttactatttattgaagaagacattcttctgtctgttcccaagaagtgccttcccagcctattcctttcagcagttaaaacaaagaaataaagaaagggggaaacccaagaacggtcaaacccataccccttgttatagcagccttacagttaagggaacaaactaacagctagaagaacacgattataacaaagaagcgtctttctggggtgggtgagctacatctcatgactgatgtgaatggccagtaaacaggcaggatactgcaggaaagctcttctactggtttaatctaagttcgctataagattaacctggggggcaggcaggtagtgagtctgctttaagtaagaaggccagtgtgaaaggtcagcagcaatgactgttaccttacccacagctgcccgtttcccaaatctgtggcaacaaaaacacccttcgcttctgactttttatgacctcttgtttatatgtttgtctgtaagtgtattaacaagagcataaagctaagtttctctatttttttccctccaaaaccagaaactaataagataaatctgtcctccttggtccccttacagttattaaaaaagaagggaacttccacattcctacaaagactggaacgaggagagcctgccaccgctgcatcacaactcacggtgagtacgcctcacaataaaaagtttattcatcctgtttgtttcaattctaatgcgttaatacgacacttcccttctcatttctaaaaccttgagtaccctcagaagaaaggtcacacacacacacttgcatacacacacacacacacacacacacacacacacacacacacacacttgtatacatacacacatgctgaaccaatgcataatacacaaacacgttcatggttttgtttttgttcgtttgttttgtttttaaactgctttgtcctcccacccactgtctctcctgggagtcagctacattcttctctcttcacagaaatctctggcagacattactgcgaagctgcaaaggggcagcccacacttcatcctttgcatcaagcccaatacctcgcagctgcctggtgtgtttgatcacttctacgtgtctgcccaactgcagtacctcggtgtcctggggctggtgaggctattccgctctgggtatccagtgcgcccttccttcgaggacttcctgtccaggtcagtctggaaccattcctctgccctctgtggagatgctacattgatgctcgttcagctttcatctggagcatgatgttcagtggttctgccctgccctgctcctatgtacaaagagaatctgggaggcggtgaagggtgtcaacaaagcttatataaaaggtgactaaccttgctgaggacaggactttgaaaacacagagctggctttcagcgaagttagtattaatcttggtaaagataatattaatgctaataactatttaatagacacaccatgccataatttatggggataattgcaaggttggtaattagataggagtaaactaagcctggacatgagtgaggtttatgaagtttggatagaagtgggggaggggcatattattggttattgtttattagcatatatctttatctatccttgcctttttcataagtagaaatcaaatcagtcttcatggatatatagctttaaaatgacctcactagaggtcaggccttctgtaccattaagttcaagtggtctttgtgtaaatgagttgtaaacctgcccataagttttgttttgtattttaaagatttacactaaccaaaggaaaaaacagtatccatatgtaagtttaaaagtaagagaccacccaaatgtaccctgaaccttcaggatgggaccgacatgggccaaaattccaagctttggtaatgagttatagttctacccataactcattaccaaaggcttaatggcagttctgtctatagacgagggaagatcatattccagcaaactgtggtctctcaaggccatggatctagatacgttatagtttggtcagtgggactaactttatttccagctcaaaggagtcccataccatgcacatcaaaatccctatcagaccacatctgagcttcaagtccttcatactctgcggcttgagtgaaccctgtgaatgagtgtctctaacagctggccagaaatattgaagttaatgactggtaggcatcgatcggaaaactctggtattatctcttggagaagttgttttgttttgatatcacccttgaaatgccaatttctttaaaaaaaaaatagaaaatgtaaagcatttagctaacccaaactccataaacttcaatttgccaaccttcttagggcaccaccccccaagtttgagatattctgtggccctagcagcagcatccatccaccaacagcaacagcgcatttctggcatttgctagtttgtttagtgaggctgtcttagggacatggtgtcaatcaagctctgtattaaggcatccctcagagattctccaggcaactttattctttgtcctaatgcttatcacaacaagcagacatcttgaattgccgtgtccctacagaataatgtgggtgggggtcatgactctgtgtgtgtggtattatatatcatggtgagttgaaatttattttattttgccttttgtatttgttacctctctgtcagagcctaccttaataaaaacagattatgcaattaaccttttaaaattaagtacaggtttttacatctatgcttctcttaagataatggcttctcggtgggaccatttctattaacaagccttgtaggcactaaataaatatcttcaggatccagacatgtaacttaatggtgtttggctagcatgtgtggggtccctggttcagttcctaacacacacacacatacacacacacacatcttcagacaaaatgtgccataggacattaactgaatctcaaattagagtgaaaattttgaataacaaactaacagccataccgatgaatttatattagacaaaaggtttgggtgtggaaaatgctgtatgtgagttaatctctgcattccttttagcattgtcttatctcaaagagatgtgatttcctcttgcctttattttgaatggctacgcagaaatgaaattattaacttacttcaacagaaatgtgtcaccacctctctgaacgtgacaaaaacactgatctacagagagattaccaacctctgtggaacttgactaaaccgcaatcaaaacagggctgtcagagagccggcgtgatttaccactccgtgcatattcagaagctcacctgcgctctgaaatgactgcaggcaagagagcgccaccatcaaaaccaaggcctggaggtagaatttagtagaaatcattttctagtgaaattttctagtgaaattccagatagcagttctcccatgcagaacagaagtccttgtattctacgtaaatgccatcataaaatacctctcctctggccacgacgaacttaactattagagagctaaaacccatcaaagcaaaaggctcaccatgtgtcaaagctatgcacaccccaaagtcgcagataaaacattgcccaattttgcagtctggaagtaaacagctgcttatctgtgtaacaatcattatttctgaattccaacatgatggtaggttgacaaatacagacaagaaagtcttggtgtgctgggttgaagacacagtgctcagtttgctttctgttgctataatgaaacgccacagtcagaagcaagctgcagaggaaatggttatttgtgttatagcttgtggctcatcataatggaaatcagagcaaaacttcaaggcaggaacctagaaaccaaaacagaagccctgggtcttagaggagcgctgcttattggctttcctcaagcctttctcagcttgctcttttatataacccacacttgcttggggatggcaccacacacaatgggctaggtgttcccacattaatcattagtcgaggaaatgccccccaatctacaggacatctgatggaagcatcacagccaacctgccgaccaaagagcttccctgcaacttcaggctctttacggaggctttgcttgtcactgtaaggagcctcagtgtgtgcccttgctacgtgggtgtgtaccttgcctgtagcaagggcgactgatatttctctatttcaagaatcttctctgttgatgtctattacttcagttcgtgaaacattctagcatggctttgtaaatcagttctcactaacctattctatagaccaccactaccaaactaccaaccatccaaactgtgtgcttttataatagcaaagcttttgttagttatgacttggggcttagcagaagcagggctcagctcaaatcagctgtgagtttggtctttgcttcatgagccaatcagaacccgcccttggtgagcaagaaggaaaaaaaagggggacccattattctctcaaattccactgaagcagcagccacagggtggaacaagactgtacccacaagaaggctatgtaaagcactcagaagagctcagtcatctttacctcattagttcatcccccaaacttagtgtcgtaaaaaacgagaatttaatcttcctccctgttcaatcagttgggacaagtaggttctttcccatcgatggggccagacagcaggagagctagtaccagggcaagcctgcatgtgctgggtgcaaaagcacttcttcaccaacatgtctggtaccttgtagccccactatgggcaatccctccagcaaagctgctcgtatttcctaccttggaaagagcttggaaaggggcaagaaagaaagttttgcttcttgtcggttaagtacggcaagttcatacgattaattccacgggttgaaaaacatcacactaatgtgtgtttatgaaattatagaatagaaagaaggaatcaccaaaggccatgtcacctccctcagtaaagctatgccagcatgagtacccaagtcccaccccagctcccatgtaaaagagctgggagtggtaaatcatgcttgtaatcccagctctggggaggcagacaggaagatgcttggggctcagcagctaacatgactagcctacatagagagcacgggattcggtaggagatgctgtctcaaatgtttcccagggaatgacatccaagcatgacctctgacccacagactcccactctcatgtacacccaaaagaacataagagtgagcatgcacacacacacacacacacacacacacatcctcacacacaattaaagaacctatcttgtctgtccctgaccatcctactcagtgatctctttaatactctgcatactcatgatgctgcaatccatgttgttttatactgtgccacgccttcacagtgccagagacccatggaccctcctctcttcccaagagatcctgccccctcttttttttccttctcctcagtttctgtcctgttctgggatcaggaatctttggtagtacgtgcccaggtggtgttggggtcattggcttctgcaaggggttctttatgtttggcggtgagtgccaggcactgccattgaagagagaggcttatacttaacgaggtgactgtatttggaaaggacagaggatttggccagcaggagcctcaggataactgtgttatgcttggcctggggatcacccagagctgtgttttcagatcgacactgggaaaaaatcctgcctggaaatagtgtgaatccttcagcttgtctaagccacatgagctgatcagtggctgtgctgtgaaggactagagcacagagtgcactgtgcagggcagaggacagaaggacaacatacagaagttgatagattcaaagtcaagggcggcaaccatgcagtgaaccaggcagtctgtgccaaaactttctcaaagtgtccttgtggcaggccagagatgccagccccttccaacacatctttaatagaaatgagatttataaggtcaggggatattaaacctgaaagtttggattggcgaatgatacattttcttacaaggcgttgccaaatctgttgggcttatgtaagatttggtgtaatcgggaataaggaaggcctttaatttttgaaatgtaaactaagagagaagcttatgtaatggctggaaagtcattttgatgtaagtctaatcaagtgtgtctttattcatagcccggttcactgctcagtggattgtgggtcagcagctcctctataatctgcttcactgtctgcagagaccccaatagcaagcaccaaaaacccacaggccatgtgctaggctcagggatggcacaggcagtgtggaagtaaacaggagagagcagcatgtgtgggcgtgacttaaaggcagctaagctaaccatctatacagatgctgtctcttttccagagagaattgtacaaagtatccattataaagcgaacagataaagataggaggccttgctgttacagctgtttgcttgctttccatactgaggctggagtggagaccttggcaagcttagaagatgccctgccacagagctacagctgagcacataagaagcaccttcagcactcactcttgcagtctggctcagaccccaatttctactccttcaagtttgattaccccattggggcagtgctcactcattcattcatttcttcattacttattcattcattctttccttgtacaagctttcactgagtcagaatgctgccataacatggggctcgctacacgctggagccttgtggtcagggtcactctacttcatggagaagccctttagggtaattattgacatcataaaggtagtaagtattatgtaattactaatatcctcacaaggggcagagctgaaactcagtagtagagcactggcctagtatggccaggtcatgggttcagtccccagtactgctaaaaaagtagtaacggaagccattgacttgagattgtctccacaatactttcctgtgctgcggaggttggttcagcgggtgaagtgttttctgtaaaaatgtgaggacctgagcatccacgggaaagctaggcatgacaacacatatccataacccctgctctagagcacgagggaaaagacaggaggacctcaagggctcactgtcaagccagtctagagaaatctatgagatttggggcctcaaagacattatttggaaagataaggtgaagaacagttgagggagatgcctggaattcacctctgacctccacacagatgcacagacaatcgtacccttgcacaccccatacataaacacatatgtaaataatgaaatgtcattgtcatgtgtttttccctaaataagagtaatcttctacagtgacccttcatccatcatgagcaatctgccgcctcactgggcagccacctgggactatgcataagcaatgtagagtttgcactctggtcccaaagcggtcaacaatccattgctgtatcaatctcaaggttgtcagtgcattccattccccaccctgagccttacccagagttctctaaaagttcttcaaggattctatgcccagaataaatgtaaaagttacaatgaaacaaaagagcaactctgacaagaggagggattttcccaggaactggggatgtttgactaaatcttcagtctctaaggctcccctttctgtttgtccttggcccagtctttgttcatcaggctccagatgtcatagctgagcataggggttgtaagtctcatctctgtctctgttagcttcttcactctctgccattcccagcaaacagtttattgttaggaaaaggctgctcaatgacagccctaagccagctgacaggttgacagcaaacacccattgtatggacaacacttgaatggctgatgtaattctctgtgcagtttacttgtggagctctgtagcttgtatttgaaacataatatttattgatacgtcatatgaatgtactaatggtggcatgtttattagtgactaaatagttttaaatgtttactttcgttctgactattccccccatagaactgtccattagatgttgtaggtcccaatggtcttgttgtgtctgcagtttatttagcaatattcccactttgaaacgaatatcctgatccattatctgagatttctggacacattgtaaccacacagacatttatgaattcatacttccattctatatggaaaaggtggctgcattttctgtttctcagctttttaaaatgcttaatgaactaaatgcattccctgctatgctgtgaggttagagattaatttgtgcatcaggaatatttttaacaacaaaaacatcacatcacaagagatagtgtattgatctcatatttatgtaaaagactatttttaacttatggaaagatcacaagtagagctgacccactttgcagaaaaccacacaaaaaacagagtgctctgtactcctgaaaagtccccaactcatgaacctaaaatcttacttctatgacagcttaattagtaaatgttcatgtaatatgaatgaaagttgtccagttttaggagtgcttaagtttagagtaaaagtaatttgttttcttatcaagaaatccacaatcttatgaaaacatattgtttcaaagtaaaatgattatatttgtaaactgtcctttgtcaaagatcacccatttatgacaaaattatttacatctatgtagaacctgaatccatggcaatcaaacattggataatttaaaataacctttaatatgttcaaagcaatgacattagcagggccgtgaatgctattgagagtcttaagaatgagtgtgtgtgtgtgtgtgtgtgtgtgtgtgtgtgtgtgtgtgtgtgtgtgtgtgtagagaatctatggttaaatgattggggttgcacaaacagtctcaactggtgagcgatggcaagaaggccagagcaaccttttccaacttttgaccgtcaggacattaactaccaaggagaatatcaaaggaaacatggatggaagtcctctgcttgattttgagggaacttctatgacgccaaccaaagagtcagaaatagaacctgacatttattcattagagataataaagtaatgatgatctaccaatacaggaaaacagaattgcaccttcactgtcttgtttgcattaacggtgacctgcacttcaagtctgacctttgtggaattaccagaaagaatcctttaaaaggtagccatcacataggaaaaaatgaatcccctgagcttgcatttggggcaggcacacttctagaatgatcctttctaacccaacatactccactgtcacgaccaatatccttgcagtaattatgtccccacccttgaattaaacagttcagaacataacgaggcacagctacatgccaacttctgatccttgatcatgctttggttatgactcccaatgaagagaacacgctctgatcatatcccaaatgatttaattatttttttttccattgctgtgacaaaatgcctgacagtgacaacttaaggacacaaggattttcttggctctcctaggggtggagtccagcatgagcggctctccctggggtgtagcacactctgggctgctctcctgggttgtaggccaccgtaggctgctctcccaggggtacagtccaccatgggcggctctccctggagtctagcacactctgggctgctctctcacaggtagagtctaccatggatggctctcttgggtgtgtagcccactgtgggcagttctcctgggggtggagtccaccgtcggcaggaaagcacttaggtgggaatgcaggacagctggtgacattgtgtctggaagcagaggtgacactgcactcagctctctttctgtttttgtctcagtctttaggatagcatcgtcccagtaaggtaggtcttctcactgtagtcaagcctctctgggaatgccctacctctttttgcctctgggaggattaaagtccagtcaggttgacaccaaactgacctatgaccctgcccaaggcctcctctggcaatcgcttctgtgtcttgtgttttgtttcgtgggctcgttaacttcccagcacaggctggatctacaagtatctgatggcctgagtgctgaggatggttaacctgcacagcccatgttagattgtttcctcaggaaagagatgataaaaaataaatcattttcctagtccagctctttcctgttagaatagaaaagataaaaccaattttgctcttccaatgatacagtgtctcacagccataaggtgaatctgttttcatcttgatactctcaggaatacactactgttttgtgattttctttgtgttttcctgatttctaaggccatttcacatctgtccacgggcttaatcactagccacgtgtctttggctgagcttctgttccaacctcttgcctaacattgtgttgggtttatcacctagtgaagttctgtgggtctccttatgacccattcacatcagctgcttctttgacaaacagttcctccaacattgtcctgttctcagtgttggagaagaccatgtgacctgcttgcaagagtttgctagagagttcattcaggcctgcaatcatacttggtaggattctgtttattctgatatttcaagcttttttttacattggtagtttgtagtttcggtttagtttttgtgttgtccgggatttgtcaacttgtcaaaaaaagtggggggtcttagttgagaaattgcctccctcaaattgcctgtaggcaagtctttgggggcattttatatatacgtgtgtgtgtgtgtgtgtgtgtgtgtgtgtgtgtgtgtgtgtgtgtgtgtatgtgtgtgtgtttctgtttctgctttttttttcagaattttcctcctccaattcctttttgacccttcctcaccaccatgcctacccaacttcatattttcttttctctcttaaaaaaaataaaaacaaagaaaaagaaaaaagaaacataaaataaatcactcacacacaacagtgagagtctgatttgtgttggccaactactgaacatgggctttgccctgggttgatactcaaccaaagaaaacctcacattgtctgtctctgtctgtctctgtgtctctgtctttgtctctgtctctgtgtctctgtgtctctgtctatgtctctctctgtctctctctctgtctctctctctgtctgtctctctctccctctctctgccattatcactcacaaacagcctcttggctaagggtagaacccttgtggcaatcctcctgcctgtagttcccaagtgccaggattgcaggtgtaacccaccatacctgggtttgtatccatattgtcacgagtctttgagttgtccagaatctttccttattgtccttttcctgtgtgcagggtgtgtagtaataccctgtattttgttcctgatgtggggactggaacttttaaggaagaagcctcaacaagttgggttggccacaaatcacaacacacagaggacatttattccctgcggccctatggaaagaggagcaaattgaagcgacctagtgacctcgagctcattttccgggtgactgacatgaagtttaattaaagcagaagagctgtggggagggccggtgtgtaagtagagtgagatcaccctgggcaaggcctggtctgcttgtgcagctccggtcctgtatgatgatcagagcaagtccttactggttgaggggacaagctggttctcagaaggccattactccagttctaccgcgcagcctcatgctcttgtacaactgctcccatctggagtgcttttgtcttgctcagggtggtttgtctcttcctgcaatccaaaatgatggcaggagcaggcaactgagctctctgtatgtcttcagcattgaaggaggataggccaggttagactggctccctgggtaggtagcatgcatgcatttagaaataaggaagggacccaacttagaggagacagacatacagtgaaaacagaggtgcctggtgctcaccctgccttaggtcaccgtgagcctaagggaagagtcactatgcttcagccaattggttcctaagcacgtccatcagtactgacctggtttgcttctttgtcatccacctagggtcccatcactgatgttatcgctactgtttcctgtcaaataactctttacagtcatgccattaacccctcaaactcgagtagctccttcctgctctctgggggtttattttagctctgtgtcttccatcctaaggtgggcctctggctggcaatgttggtctgtttcaacctaactttcaattcagagtttttcccggtttggtgaagtagcacagagttaagggtcggttcatcatcgccccaggaacctgtgtccaagattctgagcagcagtgactctggtgtagatactagggtaaatggaacaggttctcagaaagcctctgcttcgggctccaggatcaggacccacggctgctgtgtcctgctgtggaactgtcacataccccacagaaagttctgtagtaagggtctatagatgccgagtcccattctgaggtggaaccttctctcagcaggggtggtggtcatacaggctggggccagggaccatggtgtttactttccttgtcaatccgcaacatgtctgcacatacagatgcaggcaaggtgggacacagagaatggagtggggactcccaccctgcaagctggaggactggatagacctgggagcaggctgcccctagtgagatcggctgagagaggaaggctcgatagtcactcggtggttctctttcctagtgaactcccgggctgagcttcaagctacagacataaggatcccatattgtgctgcttagtttagttcagttgtttgtatagcatgtttgttagcacagcaatgtcacaacaaaattcagtcaaagtcccagaggtttgtcagagtccacgctcccccccaagaacttggtaggtgtgtcgaggtgggtctccctgcatgaacccacatcgctaagcctcagccgaagcctagcaatcagggttatgtttagagtcaccttcaattttaacatgaagttagccaccggcatgttgacactttccctctagtatttttaaggtgtattaacttcgtccttgccttttcccaagaagaaaatcagctgtgctctgtgacttccctcttcagggcacaatgggcctttcagatctatgtacttcagagatggttatctctttatctgataacttgctcggggtgccattgagtgaagttctcttcaggtcccccgtgcttggctttctagatctttgggttcagggcgtcttacaagttcaaagcaatcatgttaataactctctgctagttttcctttcctcctttctatactccactgagaattagtttcacacatgactttacattagccagtccctgggtagccagtgcactgctcgcttgctttgccctgccttctttccctggcggccatgactgccttcgagtacacttcccgtttctgaactaaagcaatctatgcctttttttcttcttcttctctgtttttagagttctcatttcaataagctcaagctcttctattaattcttcatcatttaatgtggtttctattccttgtaggaaattccttaggattttccttatctatgttgcttctgggtccgtgttagtggataattttctcagtggtttaaatgtcgtggtttggcgtctctccagggatgtgtatttgggacaggctttcaaatgttaaaaaagtttttcatgattttgattctgctcttttgtttttccaggtcttgtagagtttagttgtggataacaactaaacagttttactgttcccccttcctccctctcccccttcctccctctctctcatctctcccctctctcctctccctctgtctccccctttccccccctcctcttcccccctctctttcctctttctctcccttccccctccttctctttgccctctctcttccctcctctcctctctctccctctttccttccctcccttcctccccnnnnnnnnnnnnnnnnnnnnctctccctctctcctctccatccttctctactttcctcccctccctctttttcccccctctctctgtctgtctgtctctctctctcctctcttccccttctctctaccctctccccctctctccttccctttctaaccctcagaactgctaaactgcttgtaagttctcaccctccccttgatctctccagtttgtaaatactgtgaggatctaattggcctcacctcccctctccagaaagaaggctagagactcccatgatgcaagctgagacagcattaggactgaacatccttgctttgtgtctctagatcactgaccttcatcttggggggcactgattcgcatgttttatttagttgtatgttgtctaggatagagactgtgaacttggctgtgtttggtataatctaggaaacacaccttggtgacttatgaattatttccaggtaattttagcagagcctgtggactccctgaatgtagatagcacctcctgtgggctggaatcatatgcttaaacaaaatgagaaaaaaagaaaaccagataagttctctctctctctctctctctctctctctctctctctctctctctctgtctctctctgtctctctgtctctgtctctctctctctgaatacaatgtctttctctggatacaatgtctctctctttctctctggatacaatgtctctctggatacaatgtaacctattgctatcagttcctgatgccttgccttcccaacagaatagagagaacgcctcttaactatgagaccaaaataacccttacttcctcaggttgtgtattgtcaggtatttggtcacaacagtaagtcattaattaatacagaggttaatcttgataactgttggtccatccctgccatgtgtatttctcattgaatagatatgttaccttctcattgatactaggctatcctctgagcccctgttacctaatcttatagaagtcccccctacaccagagcttttgtttgagcaattgcattgtactggatggttttgtttgtcaacttgacacaagctggagttatcgcagagaaaggagcttcagttgaggaaatgcctccatgagatccagctgtaaggcattttctcaactagtgatcaagggggagggcccagctcattgtggatggtgccacccctgggctggtagtcttgggttctataagaaagcaggctgagcaaggcagggaaagcaagccagtaagtcacatccctccatggcctctgcatcagctcctgcttcctgacctgcttgagttccagtcctgacttcctttgatgatgaacagaagtgtggaagtgtaagctgaataaaccctttcttcaccaacttggttcttggtcatgatgtttgtgcaggaatagaaagcctgactaagacatgcactaaggtaatttttgtgagtgtggataacgcactactctgctcagattgttcagattatgtccaccagcctttcctaaacagatttatgtctctgtaaaaattaacaccgagcagctggtatttgataaagcggcaatgccagacatgggctttggataggaagtggaggcgagcctgggtctgtttgcatgtgcatgggctttaattaagttaaaagtgagcagattagacattgttcaggaagccagtgactgtcagcctattcttggagagatctgggttgaggggtttagtcaccaaatggtcaaaattgtatccatctctgcaagggtctgaacagaattctgagcattctgagtccctccccaaatctccctagcagagtgccctggctcaaaaaaatcccacctgctttattcacaatagaatttaatgacagggaaatgtcccttcctttactgatggtgtgcactgtttcagctcaagggacttggagatgttaaaaatatctcaaggaatttcaaaatttataagtaaataaaagcaggatgctgttcttttattaaaaagttttattatttgagaatcccacaatgaactgtgccctcccaaatcaatcataatcaagaagatgcacatttgggtttgctcacaggccaatctggtgggagcattctctcaatttgaagttctctcttcccaaattactctcacttgtgtcaagttgacaacaaaactgaccaggacatgatgcatacaaagctgtcacatgacactgcaggaaaactttctcaacaaaattcatggaagcatttatcctccggaataggagcaatcataaatgaaaccacgcaacgtatgatgctattgagatgcttcttcacgcccctcttaaaggtcttccatttcttgccttaccccagtggtctcttaagacctgaaggtttggaactgccagcattgctgtattattagttagtgtgaatgctgttcctaaatgtgaccaatacatttggtacagaaaaggcagcaacgagacaggttggtgatgtaggcttcagagactactcgatttccaggtggggaagtaagtagaaggcagatatggtagagcggagtccagcggcaggatgtatgggaagccaaggatatgtgacttggggggtttgagatctaacttgtgctgctcacgggctttctggacatcatggagagtatgagaaatgcccatcatgtttgtcatacatgcattaagtcctgagttttaagtggttgctttaccttgagtgatgagttacatcctgatctttttatgtggctgctttggcctggagtgtgtctgaagtgctgaggaaagactgaaggaggatcaagaaggcagaggttgaagcacgctggcccagttgggaaatggacagtccttctaaagactcatgtgttgaaagctttggtttccagctagttacaggattttggcaggatctgcaaatgttaggggtgggacctagctagaggaagtaagtcaatggggactctctttgtggggtttatcttgccctgacccagggtcccctctcactgtttcttggctgcattatgtgacaaaccttctccaccacacacgtctgctgccatgatattctggccaagcatatggggtcaagcaaccatgaactgactctctgaagccaggcattgagaagtatccttcgtcctgaacgccgtttgtaccagagactttatcgcagtgtcaataaccctggctattatgaacatatacctatagtacagaaaagcaggggatggtgcctgtacctatagtacagaaaagcagggggtggtgcctgtacctatagtacagaaaagcagggggtggtgcctgtacctatagtacagaaaagcagggggtggtgcctgtacctatagtacagaaaagccgggggtggtgcctgtacctatagtacagaaaagcagggggtggtgcctgtacctatagtacagaaaagcagggggtggtgcctgtacctatagtacagaaaagcagggggtggtgcctgtacctatagtacagaaaagcagggggtagtgcctgtacctatagtacagaaaagcagggggtggtgcctgtacctatagtacagaaaagcagggggtggtgcctgtgagagaaaaaatgtaagacgtagagaagacaggaatgctaagaactgggaggtgatctggaagaagtcaggggtaacaaaaacaccaagttttggggggcagaatagtgtgatggggtgggggggactaccctggaatgctgttactaacttgacttaggaaaggctctttgctccatagatctggggtattttgatgaaggactctgtacatgaaacagagaagcttgctggcaggagcagcaaggtgttctgacagggcaacctgaatgttgaatgttgtctgactgcctctccctctcgtgttgggtctccattcccattaaccagttagaatcatgactgacataggagtaggtaagaaatacatctcaacatttttgcaaaagggaaacacatgagatatgtatgccaggtcaaatgaaaatgtaacttataaaggtttttatttgctgttgacaggatctattggccctgcccagggaagacgtcatgcccattgctgggatggggcttacttgtccttcatagctcttccacagctcaagttctctgtgaaagatctgtgaaaggatctagtcaaaagcaatcaaactcacacctccacagggctagtcaaaagcaatcaaactcacacctccacagtgctctttaactcccagagggccctggagactcagctttcagctgaaaaacacccgagtaggacagcccttactcactgttatttgtaaccctaaggagttttagtcttgaggaataattattcaaagaagaaacagtagcaacaggggtaggcttttaggcttgacgaagaggtggggttgtggaatgagcatccaaacttcttatatattaattccttcagggtcctaagtgtcacttttagtatttttcttttgattaagacttccatttaagcgctgaggagttggctcaaccagtttaaagtacttgtctcccaggcctgagggcccaaattccatctccggaacccatattataaaaggctgggtatgatatgcattattaatcccggtattggtattggagaggtagaaagaggaggaccccagggcttgcctgcaagtcagcctggcctgacgtagacttcagtgagagaccctgtatcatgtggggaaagttaatggctttgattctcctccagtcttcactcacattgaacatgtacgtgtcccagtcccacactcacaaacacacatatatgcagaaaccttccctccaggtatttgtgcctatctgtgaaccgtgatatagttacattcctaaggtatttaaaatatctccagcttttgtcctttagacctttctgcccatgtttacaagccctaagaacaaacaatcaaaagatagtatgactgtgatttgctattttctgacaaagcatcctgggttcagattcttaatatggctgaaggtctctcattactgctatgtgaggccaaagcaatctttggtgactgaatggtcccagagaaggaaacttagacctcactttctcatattaacattgccttttaagatagcaagatggcttccctactacttgatgcctcatggtataaatgttggtttttactttgtgagtatttgctatgtgctttttaaaatcagtagttttcacagtgagcattgttcagttctcgaacagaaaccacagtctcaattcagcactcactcgaagcatggatgtccaaggttggggggagggggcgtctgttaggcaattgaaatagtcagagccgatctcggcatctccgatctccgtgccactcggctctgcagaaaatcgtcatttcacactgaacttcttaatgatttactgaatgtgatagtaccagtcatgcacttctttaaatgatgtaatttttgcattcaccacctgtcgccacaaaacttttcagccattttcaagaacatccctgtctggtctgcagaggaaaaaaaacagcagaataacaaatgtcctggtaagcccgtgtacctgcatgagcctcctgctcctgctcagaaacaggtcagagcggccctggtgaatattagattaaggagcaaattgtcttagaaatggggtaattgcatctaaactgcatagtttcaagaggtctctcatttgggcttaaacaagagaacatctgttcttttcagctcaactagacaggctgttcttgtacctgacacacacaagctatggctcagccagcaaatcacaaaatgcaccgaggataaagaaataaagctgtcaaactgactgcacaaaactggctatgcttagcatcccctggaaagcactgctgggcacaaggcagcaggaccgacttctgtgaagaccgatattccattccagtccatcataccatcccaagagaggcacactttagacagtccctcagctagaactcatgggggaggggtgaaggatgcataccctgcggctacctcaggggcggggccggacctggctgaaacaaactttgtctgttgcaaggctgctgaagtcatgaaaggagtgatatacctcatcttatgcctttctcatttctccctccctccttcctctctcctttcctttctccttccctgtcttctttcctccttccctccctccctccctccttccttccctccctccctctctccttccttcctccctctcttccttccttccttccttccttccttccttccttccctccctccctccttccgtccttccctccctccttccttttctggtttcctttatcagtgaacatttcaatcatttttttatattcattaatttatttatctatagtgtgtgtgtgtgtgcgcgtgtgtgccaatatatgcatgaaagacaggaaaacttgtgggaattgattctcttcttcctctgtgtggaaccaaggcattgaactcaagtctttaggcttggcttccggtgcctttacttgaccatctgaggcatctaaccagtccttcattcatttctggatgagtcaaatgttgttgtttcacgaaaccaagataacaggttcagcacagagcttaagagcgtcgtcatggaaactggtggcagatggtctaaagctgttcactgtgtgcgtaagggcatttcctgttccagtgtctgaaatataacagcatcattctttactattcagctcccatttgtgcagggtgagaaaccctgggtttggttccatgtaggtcatgattacacaggataaggttaaagttgtatgttcaggcatcttgccatgagtgggcataatggccagaatggatgtggatgtgtgtagcatgtggccagtcatgagtatcatcttcgcagaccgtccttgtgtacaggtcagggtcagtacctgaacgaaggcacctgggggagagaacctgacagtacacactgaaggaagatggggacacattctggtccagtgcatgtcctctgagatgcagcaaatccctttcaacccctctgggcttctgacaacagggtgtgagtatggccaaatctcatcccaaaagttctgttccatttaacaagtgcctaacatgaccaggttggcacttgggttaacgatagagcagtccctaccacaaggggatgaggaaaataaatggctttgatctcctacttggattttgagggaagaacatggagatgtggagttaatatgtcattaatattcttcatttatacatttttccttccttattggttgtctctattcttccaagcacaaagctgaaagatgcgagttctgtcttctcccacctccctcctaagcagggtctacatttagtcaaggaccacaactagattcagtaggtggttctgccagaacctgcctctgtttttactgcctctctaaatgcatccttagattgtgaagaaccacatgaggacccaagatgacttgcaacacttgagatggatcctggattttacagtcactctgctgttcttctcttatcttcctcaacccctgcatctctccctccctgcttcctttcaactccagggaatcacttgctgaaggtgccacccaggccccaccacacagcctgtggttgtattagaagctcactctttctgagcgtgtctggggagactgttcacacaccccatggctgcctgcatccaacagcctaattcacacactccatggcctctgctaggaccccactgttcatgagccaagaagtgcatggaatgactttcaggggaagaaacaaaatgtattcatgcttctacctgagaattccacgtgcttctaaggtggaaggagaagggttaccatctttctggcacagatttcttttctctttcttgatggagctacacactctctgggcctgaggttggataggactcaggtggatcccattcaaggcaaaagtaaacttaggccaaatttacacctcaacactccaggagccttgcaggtagtgggaacattatctctgctgaccttcctgggaccatgaaggcatacagggccgtgggatgagaggagacacagaaattcagtctctgcatacacaatgaggccacaggaacgcagaatgaaaatggcgacacaggagaactaggtgcagaaggcccttgtgtaggtggcagtatgcactgctcatagagagacagcctgagctgcctcgtggcaggtgggtggttcaccaaagccacgggaaggagggctccatgcaggatgctggtacaactccatctttgttttcacatcttctccttatgtgaaaatagtcaatgctggccgcggcgctggatttgacccccattctccatgtggcaatattcaagcctacctgcaccccctcccattctcctatctgctgttttcatggtgcacggcaaatctgttgctaggcagctgtgctcagccctgtgactgctgggaaggagatagaagatcaccctctgcacctgtgcgatgtttactgtgagcaagaacacaggagcaaagccagcatccaggcaagtccatggagggagccaaatgcagccttcataaaccagggccacacagccactttgggggaacctatggtgtgtaaactggccatgctgtgaccctggggaaatcctccagggaagggattctagaacttctaaaatgcagatacataaaaatgagcagaaatgtaggtattgggggtgtctagggcatactttgttaatgttcttgcctttgcaaaacagaacaccccaaacttttacctccgtgtagcccacaggcttttgtgttttatttttatcagggcctgtagaactccaccctctaccttccccatcagccaaaatctccccagattccatttctccaaggctcagcgccgcacatcaaagtccatactcttcctccctgtatttctttctgtgaccacgtcagttatgttctactgcagagacaaataagagccgcgacctctggggatgggagggggggtatgtggtatgggagaaagggctgtccagtggtagcaccacccacagtgggctgaacctccacatcaatcactaatttaaaaggtgttccacacacttgcttacagggaactggtcaagaatccctcttcccaggtgacaccagcttgtgtcaagttgacagacagctaaccagcaaacttgccaaaactcttcccccgtggtcgtaccagccttccagccctccagccttctggaatgttccaaggacaatttttcttccattaccatgcctcttcctttgtcatgtctgttaactggggtgtagatgagacaggaactggtgttcctcaaacattatttccatgttcacaaggaccttaagatgatgcatttcttaagttcccaaaataagaaaaacacttctttcctgaaacacaatcttcatccaggaaagccttgctttacagttgagcacaggcagagaaagcccatcacctccccaccccactgctgatctagacgtttcttggcaggattgcttgctcataatagatgctcaataaatatttattgagataattaaaattttaaggggtttcaggagccaaaaaaaaaaaaaagcagaactttcacttttacaacagaactttctttgagagtgaaaaggaaatgtcaatattcaataaacagaaacaaattcacaggaacacttgggggttagaaaaaacagcttaatttacttagcttatggtttcctaagaaaatgattctgttacctcctcatttcctttgaaggttgttattttaaaatctctatgttaatctggattaaaaaacaaatccctggctctatgaaataggatgtcagagttgtcctttacactgaaagggacattggcctacaagagagaagtgctcgattgtgtcctctggaggccttcttgggacctcacacattgttggcttttctctgtgtataactttgatctgtccctcttaaagcacagaaacctcaaagtgaccccagtatggagtcttttcaacttgggattcggaatgacactgggtttctgtttgtttgtttgtttgtttgttttttaatcattttattcgtttatatttcaaatgatatccccctcctggttacccctccacaacccccccaccctacttccctcatccctgtcccccttgcctctatgagggtgctcctccacccaccctcccacccacccactcccgcctcatcactctagcatcccccaactctgggacatctagtctccacaggacggagggcctcccctcccattggtgtcagataaggcaatcctctgttatttaagtatatggaaccatggatccctccatggatactctttggttggtggtttcatcatcactgtttttattctttcacatccatggtgctgaagagcaccatggttcctggtcatgaatgtggcacagcatctctggttcccatgcgaaagaggctcttgaaagcctagaaacccattcttattgtagatgggcaatgtgggaagtgggcatccagaaggatgtcaagggtagacagagacacgctgtacaaaaaggaaggaccgtgcatcctccaatgcatcttcgggtgttagactcatgggaacactgtaacagaagtgactcagtttccaaaaccatcattgctgccctgctccatcaccaggtcaaggcagtggagccttgagagtcagccacagagagtgacctggcaacagagaggggacactcatagacaacggtccatgcctctggccacactccacctaaactcccctcctgctctcggttgctttcctgtgagtctaggaaactgattggacttcccagcatccccttctggacccagctcatgtgtcaatcttttggcctgatctttgcccaaaccctattgcattccagtcctgctgatgcttccagagtcagatatgctggctcgttttgtatgtaccttactcacaggctctgtcaaagccaagtcctactggtcacctgcaggtcaccctatccttacctgttctgtcaccttctaagctctcgggagcctcgcttgttgcctcctttcttacagccactctggcttcctccatgtttctgaagaagggctgcagctggccactcagggttctggggctcttttacttcagtctacaatgggacatagatcatttgagcctgaatgaggaaacttggggtgacatggggtaaagtcacaatagtcaccttgtcccagtccagggaggtgcagagagcaggagagaacaggctagccaggaagctgtctcttgtttgtagtcagcagacttccaatagagatcacatgaagcttgcacatggagtcttcaggagacagaggagacctgggaaccatggagcagggttctggacaccagtgctgtctaaggctcccatgccctggaccaatggcagctctaggtgcacatgtgatccaaaagagtgccttgtctcatttctctgtgtagttctgtcttcacctggactttcctgagggaactcattgatctgcatttaaaccagattctgctttgctgttaaaggggcaaagtcactcagaggtcagcagactgaggtcctcctcccacctgtgaccattggtgatgatgtcatgattgggcttctgtggctcatggtctctctttactgctctgggactgtctgggttgggctttggttctcagctgcacttcagcagatgtcaggggagagactgaccctgcagtcgggtggttctggttacactcccgctcagccatgcattaccacctgtgacttattcccagtgtcaccctaggtggcttgtagaagccgaaccttcttctcaatcatcccaagccacacatctaccttggaggtgacagctgggtcttgctaccctaaaactgggtgggtgacgggaacaaaaggcttactgtagtatttgtcaattcttttctgctgcatgttgaggtagtgtacaaatattaactaaaaatatatggcttaggtttctgtattgatctcccatgagcttgcagagctattccctgtgagaactgtgatggttgccgcttccccttcccttccccaccccttccttcagtgccattttgcttatgtgtccagttatataacttaagttcaatgcatttgaataaatttaataactgatatataatttttaaatgtttgaaaaagctatgggaaaccactctactgctatatgtctcaggtaataaatgggactcaaagactcagtgataatatctaaaaataaaaatgtctcttgagaatttaaaatactcaatatatagggaggaagcctttctatcaccttgaaataaaaattgtcactgtcttaatatttctttactgaaaactacctaaatctttcctcaagtagtaatttaaaagatgcttggatttttttaaaacagttgttttctttatacaaagtcaagacaaatatttacatggtaactaatagattaatttttaatctcttccaattttctgtgaataagcggtttgtgtcttcgtgtgacaacactacatataagttgaaaatatacttaactcattttaaggataattttctctgtagaaggtaagggttatttacacttggctggtatgcacctagtctatgagatatttaaggattttctggtaaaatgaaagaatctgagaagtggtgtgaccagctggccctgttaaatcttatcatctgctgaatggtcatttattcttgtgcttgttccccaacagatacgagccactggcttctgttcttctgggcgagacgaagggtcaggctgctgaggagaggtgtcgacttgttctccagcggtgtaaactgcaaggttggcaggttagtggcctacggactatgaaaatagatggctggggttttaaaggtatgactcacggtggtagccaccagccttcctggcaaaaacaaacccccttgatatgtttggcaaggcccagcactctctgcgctcactggaaacgtgccattctgtgcgatttgtgggttttagcaccgtggaggcaacataagagactagccacttttacagcaacacagagaactactgagcttggtcagttgtctcaattcatgcctgctcactcacactttgtaaagcatctaagatgtacccatatcgatcacctttccagctccgtgacaaagaacctgaggtagacggaggatgaagaggaaaggttgccgtggctcacagctatagtcatggcccatgagagctgttgtgtttgggctttggcagactgagcatcacacacaatgtatgtgtgtgaataaagacagtcagattactgtgtggataaaggagaggggaagaggagagaagggaagatagaggcaacagctcaaaccagtcattgcatgacactcaggaagaacaggagaggaaaggaagggagaggaagaaataagagggagacccctttggtcccagtgtctcctacttcaagggtgaagcacagccccaatggcccagcttcctctttctaggtttagcttttaatggaccaccacttctcagtagtcacaggcaaggacccaagccttcagctcttgagcatttaggaggcacataagatccaaactataaaaggagaagaattcaaaaaacccacagagtaaggaagcagtcttgagcgaaacaaactgttcgtactggagccaggcctgcaggctgggggagctgctcatgaaccccactccagtttctctttgctctgtctctcatctgcctcacagtcaccctaggtggcttctagaagccgaaccttcttctcaatcatcccaggccacacatctaccttggaggtgacagctgggtcttgctaccctgaaactgggtgggtgaccggaacaaaaagcttactgtagtatttgtcaatttttttacctgcggcatgttttagatgaaacattgaggtagtatacaaatattaactgaaaatatatgacttaggtttttgtattggtcttccatgagttcgcagcgctattccctgtgagaactgtgatggttgcgttcagtagacacagtgtggaatctctgggcatttcttctgctcccccaaccccctcacctcccctttgagctttaacaagtggccaagttttgagtttcagagcttctccccgtgttccgtgttacacatgatgtgtctcataggcgcccggggcagcagtcactgagctggcacaggaaagaaataacttaaggcaaactaacatgggggcacccactagagatggaagggcaccttaggtgacatcaggagagcatcattggctgtctttaggaaaaggggatttgagtggagaatgaaatcctggattcattggaggtcaaaggtgacacagagggcgagcttttgtgaggcatgcattactgcaaaacggcctcaggtttaaagtctattgttctgagtagaagtgcagggtccttgatggggtaaacatggagatgctatttcagaagcaggggggagcagatgtctgcacacatcagaatgtgtatgagagcggcatgaccttcacgtccccatcagagaaagtgtcacaggtatactcatccatgaccaagagcacaagaacccaagctcaagcacagaaatcgcgacttcaccctctaaccactcaagcgcctcctttgttttcctccttccttttcttcttatttaatcttggtggaagtcggactttaagtcaccgtctgagggaggacgcttactcatgctgggttgtcatggttgcgcgtcggtgctgagactggatttaaaaaggaagaaattactaacccagagtgatgtcagctccccgctctggagcctgagacatcagtgtgagctccacagagagtatggtttagcaagattgtgggagctgaggtcatttccgcttaatcattgctgggagttttaagtaggtaattgtagagtagtggtttaagcatagcatgatgtaaaaggtttcagggcgtgtaatgtttctgtaaagaatactctccagtgttcactggtgtgtgtgtgtgtgtgtgtgtgtgtgtgtgtgtgtgtgtgtgtgtgtgtatgtgtgtgtgttcagacgctgagagactctgaaacacttctcccagcagggaagctactatcagtgctaatacccaatcaggattcccagtgtataggttggtgtcaatcatgggaggaagctgggatgcacattgatgtacgctggttggcatcagtcttaccaggactgtgtccaggatgggctacttggcatagcaatggaagagagtattaaattgagacacacattggtacttttaaaaacgaaaatcaaatatattttaatagggaagcattttcatctcatcacacaaatatattttctccttacttaaaaaaaattacttttcttgcatgtgtatttgtgggtgcctacatctatgtgcatcacgtgcatgtctggttctggcaagagacaagaaccaggcactggatctcctgagcctaagattgcagatggttgtgagccaccatgtgggtgctggagcccaaacccagaaattcttcaacagcagcaagtgttctttattgctgagccacctcactagcccagcctgagcttttttttttttctccatacaataaagttgaaaatacaagagggagggaactaaggatgtgtgtgtgtgtgtcagagagagagagatgaatacagagaaagaggcagagagagataggcagagagagaggcagagagaaaggcagagagagagagaaagagagagagagagagagagagagagagagagagagagagagagagagagagagaaagagagagagagagatttccccccaagtacatctgctaatgagttctgcattctctagttatggaagacagattttcttcagtcttttcaaggggagacatctatatctatattcttcctgctgcaagatgagtagttgtaatcacagacatcatgcttatttatattttatttctaggttaaacagaaaatcacttgtgttagaaaccgagttattcctaatagagtaatcagacccttctggtccaaaagcaaagcctgtgttggaaatgtactgctacccggctggagagatggctcagtggttaagagcactgactgctcttccagaggtcctgagttcaaatcccagcaaccacatggtggctcacaaccatctgtaatgagatctgatgccctcttctggtgtgtctgaagatagctacagggaatttacatataacaataaataaatcagaaagaaagaaagaaagaaagaaagaaagaaagaaagaaagaaagaaagaaagaaaaatgtactgctgctacaagaggttccaccattgattctattctgggctgtgaatcagttcagaaattaagtagcatttagtaaggggctgcatgacagaggagccaggacagcaatgggcaacttctgcacctgaagcatggctcccacactgcgaaggcacagagcagtgacattcagcattggacactaactggtcaatgttaaattaatgcttatttccccacatcattacaaggagcactagagagcagacgagtcgagtcacttttacatcccaggaacccatgcaaggggttagctaggaattcaactctctttactataatatcactttttattttaaagtttatgtgcattatgtgtgcctaattgcacatgccactgagctgcagaggccaggaggacgtgtcaggtcagagctacctgcagttgagtgtcacctgatgtgagcactgggagacacacctctgtgtccactataaaagtaccaggcactctgaaccactgagccatccctccagcccctatgagtttttactgtcactcaagtgatacggtggcttttgccatttgtccttaacatcgatcagacctggcacagtcaaccataagtcttcagagcgggatggcagcttcatggttcctgtgtctgctttctcacagaagcacatgagcacccaagcctcctcctgattagaggcgtcagatcttgggagctgttagggttttttttttccccattgagagagaaatggaggaagaaggtgaagatagagtgaggatggatagaagtgggtgagggggtgtgtgaagttaggtgaggacaaacacatggcttgttcaatgtcattggatggttgtcaggacatggggagtttggggcgaatagccagtccgcttcgtctgtgtgttgtgaggtgaccactcagcactttctccattttattgacttttagcctaatagcctctctgtggagaagaagaaagtaaccacagtgtagaagtgaggatgctggtccccagagattggctgctgtatcagcatctttcctgaatcaggggatctagttcctattcacctcaccttcgctgaaatcaacctagagtctgcctcaaccttcttcttgcatttggcttgatatctgctttacatgacagccctgcgaagtcattttgtccaggcttcagaacttgaaagggacagattgtgcttcattatagagctttgatctcaggtacttccatattcctatatcattgagcagtctaccccttgcagccagtgtctttctgtgttttagttcactgggcagacgagggaagacctagtaccacttcctgttgcaggctggctctgaaggcgtcctctgtgcccagagcatcatccatgcagtagcactcagcttttacctgagcattccaattggacctaggatcacagttctgagaataagaaactatcattgatacgcgctgggtacttcatgtagacatgcaactgtgaattgtcaaattgagtcacaacagaaaactagtacttgttatgtcttagaggggagccaagtgggattttgctatgtctatgcttataagaaatatattgatccatcaagtctgtgctggaaaatgaccacacaatgcataaagtagcctatgtgcaggttaggcataaaatattccaaataaggccagattttgctgagaatctctgtaaaagctataggtggcttcacgggtcctgactttcccatctgtacttcccattgtgactctcacacatgcatcctcttactgcgacagatgagctcagctttcttttacagcttgagctggtaaataccggttctggcaaattcccacacggtactgtcctctgaatactcagaatcactacccttacataatgtggctttatttcaaagaaagaggaagaaaatcaggacatagtgggaggaaaccttcttgttggtggtttcctattcatgtttaacacagaacatcatgtttaaaacaccaggaactgggggctgagagacagctcatcggttaagagcacttgctgctttccagaggatttggtttcaagtcccctcacccacagggcagctcatgaacgtctctaactccattttcaggcatccagtgtcttcctctcatccctgtgggagtcagacaagccagtggtacccagactcatatgcaggcaaatgctaaggacattaaataaataataaagtcaaatacatatacatacgcatacacaaacacacactatatatatacatgtgtgtatatatatgtgtgtgtatatatatgtatatataaactatggagccacaatatctaagagcacttgctgctcttgcagaagaatcaggtttatcttctaacacctacatcaggcagaacacaggctcctataactccagctccagggcctctgacacactctttaagtttccatgggcactgcccatgtgtggtgtaccaaacatacatacatacatacacacacacacacacacacacacacacacacacactcagggcacatatacacacataaaataactcttaaatatttgtgtgtgtatatatatgcatgcatgtgtgtgtgtgtgtgtgtgtgtgtgtgtgtgtgtgtgtgtgtgtgtagctagtcagagacacacccttatttgcaaggcagactgtgagtaccagtgtctttgctaagaggaatggaagttagtagaaatagtctttgagtagaatcttcatgactgtctccaaactttgttttcttctcacaagatgtatttttctttactaaacagagttcatgaattgcttatttgtgtgagaggtaaatgcaaatagacttaggtcatagttttaaaccagacattgaaccatccatgatttgaaatataattatttattattgcattttatttgttgcaatatgttcacttttcattcagtgttactttgagataaatttgatgtaaccaaatagatatacacctctgggagatgccccaccagcagacattagccccccccccccaggaataatcttgttttccttgctctttcatttctgtaaaatgaaaacctctgaaactaattctaagtgacaaaataagcggtataatctgattttcacacattttatatgcatcaactggttatagggtgctttcttctgtgttgttatttgaatgctatattcatttctctgccatctggagggatggagggtggagaagcagatctgttggagtgttctgggatgccaggcactgcagaacaggcactgagagccacagggagtcgggttgggcgtggccttgttccctctcagaacactgtcaaacaaacagacatgaagggaatgtttttctgctgatttctgccagtttgggtggaagaaaggagggaagaagagggacatccactgcagccttggaaataggtcccgggatgttgttcccagaggcagtaatgattttagagtccaacctcagaggcactgtgtcatctagtgattggaaaataaattggagacaggatgctcctgaggtccctctgcaatatcgtgcagactgaaacaagaagtgcaatgggaacttcaccttcatctcaactgcctgtgcatgggacatcattctgtgtgtgtgtgtgtgtgtgtgtgtgtgtgtgtgtgtgtgtgtctgtctgtctgtctgtctgtctgtctgtctgtcgagggtgtgtttgagagtgtgtgtgtgtctgtctgtctctctttctctgtacatctgtaagatagggagagacacagagagacagagactgagaaactacaagaagcaataaagttcattcatagaaactaaatccttaagtcattttaaaatgtttactataacattaatattttaggaatttcaaatatatatacatatatatatatgtacatacacacatatatacatatatatacatataaaacatatttgatcatactcacacaaatttctcctccctgactctctcagataccaccaattctcccagacctcaccctaatcaaactttttgtccattgatttcagcttgctataaccatatccttatgtgtttagggccgaacccttaaggaaagcagtgttccatctccagaggccattgacagttgacctctcagatatgagggttcttgtgccatgctggcatggtgactggcttggtgactagcttggtattgtgcacgtattgtataggcaaccacagctgcgtgagtttttgagtactatcatgctcaggagacatatgactctcacagtactctctcttcttcttcttctatgatggtccctaagcctcaggcaggggcgtggtccgaaaagggcatgaccagagacatgtgatccagaaagtgtgacccagagaggcatggtctagaggggtgtaatctagacgggtgttatgcagaaggatatgatccagaggggcgtggtccaggggggtgtgatccagggggtgtgatctagagaggtgttatccaaaagggtgtggtccagaaaggtgttatccagaggggcaggcatggtccacaggggcatggcctcagggacgtggtctggaggggcgtggctgagctgcagtgactttgtgttaaccactgctcactgcacaaagacttctctgatggggattgagcacacatttccacctgtgcgtgttcactaaccacaacaaaacacttctacagtcatcctttctctgtcaccgacttcttaacgcgattttgacagaatggcccacatttcatctgtgtctgagatacatgattccaaagtcttcaccggagctgtgctgagaacagcaagaggagcatttaccatagcattaaatagaatcagccggatgaaggatttattacttcattaatctaaaatagtacagtagggagatgattgtgaaaggagaagcaagatactgttcaagttttaaccatcttgctttaaaaaaaaaacatgtttgaagatgaggcagttgtgttagggccctcagctcttattagcacaataaattaatggtttataacctttattttatcactctaggagcacttcataaatcacctgtaactgtgagtcagaaactagcctataacatgactttttctattcctcctccttctctggaattaacagtgttgagaagagtcaacattagagagttaagaaatctctgaaaagtgttccaaccagttcacaggtactcacatttcattccctgtgtcttagtcagggttttactgctatgaacagacaccatgaccaagccaactcttataaggacaacatttaattggggctgaattagaggttcagaggttcagtctattatcatcaaggtgagaacatggcagcatccaggcaggcatggtgcagaaggagctgagagttctatatcttcatctgaaggctgctagcagaatactggcttccagtcagctaggatgaggttcttagagcccacagtgataaacctactccaacaaggccatacctacttcaaaaggaccacaccttctaatagtgccactccctgggccgagcatatacaaaccatcacaccctcttttttcgtatgctgaatacttaacacacccgcacacccacggcatacataagcatcaatgttctgttatagaacaatatgtattcttgatttctaaacaattgaaaaggacatccaggaacctttaggaaggaccaatatagatgcctagggactgtcagcccagagtttttggtctcaccttttctcacacttttctattatgacagagacataataaagacagagagtgtgcctgtttctcgtatgctttctcagtggcacgcccctttagctgattggcttacagtatcatacaaacctaaaagattaaatagaaactacctgtgcttgtgcctaactttccctctctattgactcaaactgtttattgagcacatttatcttcctgaatttatacggagtaaagatgatggctcacggactgggaagcaagagatggtcaagagttaggcggcatgaatcagagagggatccccagtgtgagagaggcaagatcacggtgtcagaagatgagaagacattggtttagacagggcaatggaggccatgaaacagtttctgtgtagttcccaggctgcagggttcagaggggtgacaagctgccagcagtgagatggggcgttccaggagggcccaggggaggaagtgaatggacagtgtggagtgaaggtggccatgcagaaccatgtgcaagtgaaggtggccatggttgtacatgatgggtgaagccccacctaccagctgagagggtaggtgaggtggattcagcagggactcacgggctttacctttgggttagttaattacctcgagttgttgtttttctacaagtgtttcaaagcactttccatacatcataaagtacaagaaaataaaaataaaatattaaaaaaaaacttgggttttctcatgagaagctgtagggaagtgtactggctggatttgtgtgtcaatgtaacacaagctggagttatcacagagaaaggagcctcccttaaggaaatgcctccatgagatccagctgtaaggcattttctcaattagtgataaaagatggaagggcccattgtgggcagtgccacccctgggctgttagtccttggttctataagaaagcaggttgaacaagccaagggaagcaaccattaagtaatatccctccatggcctctgcatcagctcttgcctccaagtgcctgccctgtgtgagttccagccctgacttcctttggtgatgaacagcaatgtggaagtgtaagctgaataaatccttttctctccaacttgcttcttggtcaggatgttttatgcaggaatagaaaccctgactaagagaggaagctagtgatgtgatttgacttatgctttcgatgtgtttatgtggcaacaagaatagatctgagacaccagcaagcagagcagtgcttgtgccataggccagtggaggaacagcagaggttgggaagaaggggcaggtatgggagtacagggagcaagaggccgcattctacacctgtaatatgcacacttataaagttacaggcataagatggagtcctgaatatcagcatatcagtggagttcaggaacatgcgtggaccttaacaagtgtaaactgggtttaaaaaagaaatcacaagtgacaccccaaaagacagcagagactatgataactcaaaaaaaaaaaaaagtcacaattaacatgcaacctgatatgttgaagggaaataagaaaacaatgtaaagctgggtgtggtggcacacacctttaatcccagcacttgggaggcagaggcagacggatttctgagtttgaggccagcctggtctacaaagtgagttctaggacagccagggctatacagagaaaccctgtctcgaaaaaaaatgtaaatagttttgaatctctaaaattgtggtgaacaatataaggtcagaggccaggaagaagtgccaatgatatttgtatttttagaaaatgagccaagcatcagaacccagtgtggcagaaccatggcagatactgagaacaggttcacatgggtgtacacatagcccagtgatggcagtggttttagtgctgcccccactggggcaccagccaagtgactatggtggctttagtattgtccccactggggcgccatactagcttcttttgaccatggctcacaccttcctccggggaggtgaacattacccatgccatttaagcctgtgtttggaaagtcaaacatgctccccaaaaaacactggatctagtgcactgtcctctgctgtttggggtgcatggtcttgcctggctcctgttggtctatgcctttaggaatgggataccttcatgagcattcttgctatattgatacaatttacataatgaaataataataaataggctcacaaggtgactaatccactagtgggctcaaaacagtagttcagttcatcactgcctgttctgcagactattctgtcctaggtgagagcaactaatttggtctaacacataatcacatgtaattcaagccaaactatcttcttcagataccacactatatactaccctgtcagaagtgtgtagttgtgattatcttttctacgttggagtgaaacttcaagagcaatctatttataacaaagagagcttgcgttttgtataaatttatccttgagcatgtttcaaagtacattcagacattcaaaaccagactgtacataaaaacatttctgtttagtaggtttccaaagctacaaaatgtaatatgttgagcttttcatagtataattaatatatattcatatgtattatgaaaatagtggctgtccttcaatagagccaagcaaagcattaaggaagaaaaccatgagaattcagcctggagagaagagagttgagaacagttgcttgtctaagcatctgcaagctattgaccacattctacttatcaggtggtcctagaaatgaccacaaaacagtggatttgtgcatgcatgagtgtgtgtgggggggtatataggtgagaaatggtggatgactatgtaggacagctgggaagattttacaagcaaagtacccttgtgctacaggggaaagaaagccagaaaaaactgaaatgggaacattgggatgttcgcagtgcccaatgagttgtaaggtttagagagagacaggtaccagcacacagtgtggactctttatggcacacgaaaaggtcttggctttggagaacgtttctgatgggaagagttgacctggtgggcacagaaactgctttgcatagtaaaaatagaacagtattttacaggagcacaatgacattctcagatctgcaggaaaaataacaaacccaactgggggcctctgcagacagagggagatggagaagagagagcctactgtttgcatcagcacagaggagcaatatgtttaagccaggatcaagttgacattgatggggccttcagacgataccaggacactttctggaatcttaacatctcagtaaaagcagatgaccacttttaatgcaactgtattttgatcatatcacaaacataaagcagttattaaaatagtggatagttttagatcaaggaaaattagaagctttaaaggttgggtaggattgtcaataatgaaaattaaatgttttgtttgaagcaaagaaactcatctccaataaggtatttctcattaaaatataatctatacaaatagcatacttcaattattatagacattgaaataaagagatgttactgaacacaatgctcacaaaagcagtgaatcactcactaaggaccatgtgtctaagcatccgcccctgctggtatataaagattcctcgcatcagctttctgcttcagagagtgagtaggaagctgaaatgacagtaatagcctctctctctcaggaggaaaaagggctctctcttagaaagaaagaaccatgctgccgagggctctgaaggcaaatccaagggtttacatgttggattgctgcctacctggagccaccaaagtttccaagagatgagtaagttcaaagtagtattcaagagcattcaagagtattaaaaaaaggtagtattcaagttgactccaagaacaggctgggaattgggacagacttaggtggaggacttgggtcacagtcatcccctgctagaaagaacggccctgggaatgtgagatgtgttgtctttgttcttgaaccacattatacatgttctataaatagaataaaacacatagtttaaacacctatgaaatagttaatagttttcaatgaattatttaagtcatcgaacttttctaactatcagccattaaacaggacctagaggaaagctgtagatgagcttggttacaccttgtgcttctgtcttcgggaataagttgttgatggtgtgtctgctagacctagaaaggagcagcctgcgtgcatggatggaaactgtgtgggagaaatgacgtgtgtgtatatatcttgggatggaggttcttcagggacatccgtaacgtggtcctttcactcactgaggtgggcgtataggagatgaactcaatgccagaagaggaaaatgtaggagactcctgtctagaaacgtgaaatacactgtgaacctttggcaacaagtcccctaggcctggactctgccattccaacaacctgtagatgtaagagtcacctgtgaaaagcttagagtaaaggagtcatcaggagtacagacgtgtgagaacgatgaggatacagaatctaggacaaagaccatggccaacactgacatgggggtggcagacagaggacggggtcaaggagcctgtggcagaaggagagcttcaagagtgacctagaagctgacaacagagcacatagcattcggttagcagacccacatcatggcaacctccagctgatagagacatgaagtcacaggctccatcccaacctgtagatccacacccacctggatgaataagcagactgaaactttggaccgtggtttagtggtttaccctggagcccagaaagcccagattaatcacctctctgccaccagttctgtccatcatccgtctcctcctctcctagaccatgtgaaatacagaagttcaactagatgaggtctgctggctgagcctgcatgatgtatggacagtccctcttgtggtctgtatacagtggctcctattatcccctctggagacacatttcccttcatagtgtcatttataaacaactttcccattccacctgtgtgtagccagaacccttcctgcatcctttaactcacacaccctttctcttggtcaagcagagacacaggaacctaacattcttctttaacttacccacagaagaagcggttattcactgtgttgtcaagtgcaggaagtgagttaaattggttcacgttgggattcagacaatggatttgtctttttcatttcctttttttattagatattttctttatttacatttcaaatgttatccccttatgtggtttcccctccaaaaaccgccctatcctatctcctgttcccctgctcaccaacccacccactcccacttccctgtcctggtacgatttgtctttttcaagttcacaggaatgcatgaacattcaaaggatgatactgcttcctatactgtaagactagctccatgctcatctttctttacttcatcatggcagagaaaagcgtgactcacatgaattgtcccagttatttattttacattttttctagttatatattttccctcattagatttattacaaagaactgccagaaacacacagtgctcctaaaattgccctcaaagaacaaggagagtttcacaagatccctcgttacctccattctaatacagcccccataccacccacaccactgttcctgtgtttgtctgcctccacagcccacatttctgaaaaagttcctgagaactggaacaataatgggagctttggaagtcatcaatgacaatcttgtttaatcctctaaaatctgtcacttcaaagcaaaaatatcctaatgtcttcctgaggagcctcctgatggtgtgactcacagacgtcttgctcttacagcggtcagagcgacgtgagcatttttgtctcagataaaaacactgtgactccaaaccctctttgtgactagctagtgagaaatagccgtgcaggggaggtgggaccaggccactcgcagcggagagcttagagtttggactgaaatctgttcagtcttgacttgagattcagtacagcataccacagcggccattcttgggacaaaagtgccaatctgggccaggagtgtttacccagtcactggtataaactggtgctggccatacagagacctggctctctgaattcctgctgggggtccttaggcttctgtcctttttaattcctagcatcacagaaggcaagagactaaatctaaacaatgtctcgggaagaattccaaaatgccaacaacctgctaatttaactcctttggtagagaagaatcacttgatgtaaatgcagcctctttcgaagacagaacaagtagggaagacgagggctggcgttctgttacacggtgactgtgcagaggaaactcactacaaacaagtgatcaacgtttggaaaaataagaatgcccaccctgatttaaatatcacacagtatgcctacatcccccaaacactgtgtggtatccatagctttgtatggaatcccttgtggacaacaattttatgcattattttttgtttgtctgtttgtttttttaatgagaactcaaaacagccatcaaaatcatacaaatgctgaaacctccaaagaacatctccaaatattcctgattacacaacacgaaatgatggcaggaccaccatctttggttatctgtagagttttccctgtacttgacagatcttgtaaagtccactgtccactggaaagcagtcgcctatatcccagtatttgaatgaaggattctttttttcaaagccggaatgcaattaaagtaagatctcagccatttcacaatgatctgaacctcattgtcatggtctacttatatgcgagttcagacttccatcctttttccagtggctcagaaccctgggagtacctttcatattcagaggccatggccccatgccatcaatatagggggcacagctgtactgaacactgattgaggactctggaggcatgcaagtgcctgcctactcagaattcttccttccaccctcacagatgagcataaggctacccgctgtccctttttgctatcataccacccagcaagacttctcgttttcctacatccatgctaatttcacatgcagatcttcccagactgcgcaatcctcatctgcatgacagatcttcagaatcaccaaatctctatgatgggccccatcatttatgctgactcatcatcttcactgagggcttgttggcagcctagatggtgttctttattgccttcatgacctgcctcatacaaaactctacagtctcccctcccctcccctcccctcccttcctttctcttctcttctcttctcttctcttctcttctctcttctcttctctcttctctcttctctcttctctcttctctcttctctcttctctcttctctcttctctcttctctcttctctcttctcttctcttctcttctcttctcttcctatctaaacggtattcattgccatccttaacactctgttcttccagaatgtgagcctctgtccatcaagagatgtaactgtggcatccactaataaacaagtgaagaatcgatctccaggtccctgaggatagaaatgaagggcactgaagccccagtggaagtagagaagctgatttttaatccgactgggaaattgagtgctgacattagttatgaaggatgacagagagttgatcaagagatcagcagcaaatgcagagtctttccaagcccaaatggtccatggctccacttgcttgctcacccattgcgtactccaaacgctcagcagaaaagcctattgtccagactttttaaaaattaacttcataaaactcaatccagaattccaaaattatttcacgaatttagacttgagtttctaatcttccagcatagccaaatggcacacatgtgtgcacttgtccagctttttcctaatatgtcctccatggtgtgttaacacagccagaggttacctttcctctgccacacagattgtatctccaagggcctttcatgtcatctttcacccttcaagcagcccttggaaaacaaggtgcgaatcctgaatcctccctgaacatatcttggtcacacctctagatccctgcattccttgtgtgcaattcagtcatcagacagaacatgtgttagcagagtcttctcagtgctagcatcccttagtaagcaatcagctccccgaggacaaggatcacctaacttgtttcctcaaagcccagaaaaaatgttccagataaacctactctggtgtttgagtggctttaggaaacatcactcttcatcaccagctgccttctgcccaagtccctgtgaagacaaggctgggagctagagttcccttctgctctgtctttccctggtcttcttcaggtgttctgctcccatgtaccaggtctctctgggatttcaagttctagctcatcgtgtgctgtttggaagatccctgtcggaacttgggtttgaagggttcaattttccaccaggaactgagttccttcgactgtgatgcagagagaagcgcctgctccctgccccgtggccacctcacagagctgttcttcagagttcagagcccagggccaagggttcttcctgcccactaccaaagtcagcccacagttaaggaataaaaagaccacacggtatggaacgcggtgaggacagctgaccccttgtcaacctgacacacagatgcatcactgttgagccacagcccttccccaagacttacattaaaaacataaatgactccaaaagtcccacagtctttacagattcaagcacattaaaattccagtccttttaaaatatccagtttcctaaaatccaaagtcttttaaaattcaaagtttcttaactttgggctctggtagaattctttcttacttcgagagggggaaaaaaatcagggcatggaacacagtcaaaatcaaagcaaaatcagattccagttgtccaatatctgcaatccactgggctccttcaaggggcttggatcacttttctagctctgccctctgtagcacacatagcttgtctcctaggctccagctagttccactccactgctgctgctgttcttcatgagcatcccatgatattaacatcttcaaagtcttttgctgcaactaggcttcaacaactgcctttcataggcttctcttcatggtagaagccccaactttgttgcatgaccttcagtcctggaccattgactgctactaagtctgcacctccaactgccagcaggaggtacaaccttggctgcctctggaacatagcttctctgtgctctcaggaaacactgcccataaactttcaacatcagtgatgctgccttcttcatcaccgataatgttttagctctagttaaccagcatcaattgttccagtaacataaaggtttcatttcagtgattctgctatcttgttaatcacagctgattcttctgctccagttaaccagaaccacagaatcttacatcaaaacggccctgatagagatttttaatcttccctctgaagcttcacaagccagggctccatcctctgcactggatcctctccacctcagcagtcttctgttccaagcacccacagatcataccacagagctctcaacactcaatggtttgtccagaccaaagttccaaagtccttccacaatcctcccccaatacagtcaggtctggcacagcaatgccctcactatgctgataccaattgagcttagatagggtttctattgcttcaatgaaacaccatgaccaataaaagcaagttgggaaggaaagggtttattcagcttacactaatagagcccatcattggagaaagtcaggacaggaactcaggcaggagctgatgcagaggccatggaggatgttacctactgacttgtttcccacatggcttgctcagcttgcttgcttatagaacccaggaccaccagaccagggttggagccacctgccatgcactgggccctcccccattgattgctaactgagaaaatgccttacagctggatctcatggaggcattttctcaactgagactcttctctctctgatgactctagcttctgtcaagttgacacaaaaccagtcagtacagtgagggaatgagagtggcaatgtaagggagaaagatggatgctactcagaagcagccttcccattgtgtctgcctcagattccaaatgactgaaagaaaactaaatgaggttcatggctgctccacccaggagctgttaggaggggagcagagagctctcaccactgacctgtctgatcatcccagctgacaggatgcaagctcagggtcacactaaaacagtcgttcagtcagacaatgagccccagttaggaaagacctcagtggggaagccgaaatgtaccagatgtgttcagaggtgcttcagggaaaggcacacagactcctctgcccaagcattctgaaggtagtaagcgtgacctgtaaaccctctgtattagtcagggttctctagagtcacagaacttatggatagtctctagataataaaggaatttattgatgacttacagtcggcagctcaattcccaacaatcgttcagtcacagctgtgaatggaagtccaaggatctagcagttactcagtctcacgcagcaagcaggcgaaggagcaggagcaagagctagactcccttcttccaatgtccttatattgtctccagcagaaggtgtagcccagattaaaggtgtgtnnnnnnnnnnnnnnnnnnnnnnnnnnnnnnnnnnnnnnnnnnnnnnnnnnnnnnnnnnnnnnnnnnccagatgaaaggcgtagcccagattaaaggtgtgttccttaaactcggagattcaatcttctggaatccatagccaatatggctcaagatcttcaaaccaagatccagataaggatctccaagcctccagataagggtcactggtgagccttccaattccggattgtagttcattccaaatattgtcaagttgacaaccaggaatagccactacaccctccaatacccaatggtgtgggcacacatgccagcctctagtgtcactgatgtgtggtgtagactgagagctgttgtcacttttatgtccctcactcatgctcaggagcacacgggttaatcttatgtccttgacagttgtctcaagtgccaagctcatgattatgatagttacagggacagcatttggtctttgcatagcagaacggtactcaaagatccctccacccttcctgcaaggacacagcagcatcttccacagttatccctacctgcttccccagatggcttggaatacttgccttgtgagagaccaccctcacatgctcctctgctctgtcgtccctcagacaagaagtgcaacacacagttaaaaccattttaaaattgtgtggctgtagcttgccatgctggctttaagatgatttcccgagcagcagtttttaccaaaggtaccacatgcaaccttcgttaccaatggtgtagtggcataagctcagagagatgcctgcagtgctttcaatactctttgtggaaacgtctgtgaatctggggctcagaagtggttttgcagagtttctctagtatgctgaagttcattaacaacagaaacatgcatacttggtgcataagaatccaccgtgccattgggggatggactgaggtgagacagcagttggcaccatgtttgtttgtgggatcctgttctcttgtgctgcatcaagttcttcctttgctgtgcatgggaagggcaggagatgaacatcaccctggagaaatgaggggccctgatatgaaagggttcgctggggcactgctatctttacagagtcacggcgcattccatagggcagccaccatgttagcaatgcataggtgtttccacacaccagtgatggcgcacgtgctgccagttaatgctctataacaaatcactttaaattctgatgaaataaaacgtgctatagaagaagaaatacgtaccttggtcaattttgttatttgtagcttccaattctctgctctaagaacctcctgcccgaccattttcctaccaccaccccccaccccatgtcttattgccgccaaacaggaccttgctgttctcgttgtagattggagtacacaaagtgttcctgaagtactggcacgtggaccagctcagcgacctgtggctccagctgcaaaggaagattgtaacttgccagaaaggtaagcagcacacacgggcacttagacctttacaatgtgagtttccaaaccactcagtgcacctctgagtttaactgtcagcagggtcggcatcacagtgcacttctcaacctactccatgacactccatcaacgcaagatcctcagggggtctgcggaagctctgctgcttagttaattctgtacattcctacatcgctgtttgcagatcttgcatgtcttattggctatattctgtatgaaattgtgtaagttctcacctcaatttgggggaggaaataaacacatcttgacagttctgcatagcacactaggtcctgcatagtaaatacgtccacatagtaccttgcgggtggccagcggcagtgttctctttaggaagcgcaggaccgttagattgtgcctggaaatgagcaatgggaaaacccacctggctcctagctggacccgcagcgcaggcccctgtggcatgcaggacagatctcagccccctgtcttcctttagggatcaatggtaacagttgctgtgacttatttcatggctgttggcacccgcttcattataatgttgggagaaattatctttgaatgtgttttctatccaaatccaaatgactgctaaaaacatgcttttttacaaaacagccactcctctcatgaagtggatgtaatcaatacattagaaaatgggatgtgtgtgtatgttcctgtgtttatgcctgtgtctgtgtgtacatgcatctgtgtctgtgcatgtgcatgtatgtgcacatgtgtgtgtgcccatgcatgcacacctgtgcatggatacgtgtgtgtgtgtgcctgtgtgtgggtgtgtgtgtgtctgtgtacgaatataagtctgtgtgtgtgtgtacaagcatttgtgcatgttcctgtgagtacacatctgtgtgtgcatgtgggcatgtgcctgtgtgtacgtgtgtatgagcgtgagcacatgcagcatctcttttgtgtcagcatgaaggacggaggtaaataccgagttacttctgttattgctttcttcctcattctgtgagacaaggtctcttgctaaacctagaactcacgcaactggctaagatggctgaacagcaattcctcaggatgccccatctacttctctggttcccagccctttaccctcccagtgcttctaaaaccagcttttatacatgagtgtttggtggctcaactcaggtcttcctgcttttctagtgaccatatcacccatggagtcatcttctcagccctctgtaaacaggtttttatgtgctccatagtttaattcactgtagaaaagtacaggaaaaagaagttaggttatgccaaatttcataatgagcacatgtctgggatgtatttgaaattttctaaagccaggaaacctgctagaaacatgctgtgagccccccttccactgtgccatccttcctgtgtggatcctgttaggctgcagcctagggaaaaatttcctggtggggcctttcagtttctgatggaaaaaaaaatgtccagtttaaattttgactaaagttcagaaccttgttccaagtcaacatctgtcttgtccacttcaggcctgcaccttacagaacccaggagagagatatgattgtcttggtctctgtatctcagatgcctcccacttgtgtagggtcaagaggagagagaggagggaaagcgaaggtggagaaggaggaagaagaaaagaaagagaggaagagggacagaaagagtcaagaggaagaagacataggaagaagggaaggaggaagaagaggaggaggaagaggaagtagaagaggaggaggaagtagaagaggaggaggaagtggaggaggaggaagaagaggaagagaaagaggaagaggaggaggaagaagtagaagaggaggacgaagtagaggaggaagagaaagagaaagaggaagaggaggagggcagcaagcactatacaggcattttgtgacccagcactgctattcctggctgggacagattcaaagtactctttacacatctttgatgtatttataaaaagataaagagaggggagatatgttttggtagatgagtggtgaggtgtgggggaaggggtgtctcagtgggcccattcggagacatccctccacctgagggaccagccacacaacagtatagtatagaatagagtttattcaaggcttggggaggggagttaagagggtagtagaggcagagaaaggcagagagacagagacagagacagagacagagacagagacagagacagagacagagtagagaagtaggggagtagaggccagccatgagcacatggagagagaagggggaagggaacggggagagaggggggaaggggtgaggggacagatctctcagggtaatctctgacatcactttatccagcccagggctggaggagccttggctgaggacacagttcccaggtcatggttctgagtccccttctctctggcatatggcaaatggacttcatccagcattcatgcccgagagatgtaggctgggaccacttggaagctcaccctgccccactccaggtggcacctgcaccccccgcctcacctggaggctggctggaaatgcagcctcagcaccagccctcactgactgaatccaatgtcagccgcagctgaatgtgggtcaggaagagcccatgtaacacaatgctatgtgtgaacagagcagggcaccctggtgttcctgggaaatgttcttaaatataatcagaggaacccgagccccctcttctacgtgacacccacttgaaatttgtcttctagttagcctcagagactaagtttctcctgtaaccaacctggagcagagatgagctgaactcggccccctcacctttctgaagataagaatggggagcagccttgaaaatggcattgagatttaaaaaaacataatttcatttgaataaaggaaataatggactaaaaaaagcacttcagaaaccacgggcttttgaatgtgaacactgcttactggtttttattttctcttctctcagaattgatactaaactcactcaaaatttaagtaatctagatgaatttccaccttttaatttcatttttttttcttgttgttagtaaatatctggagaaaagagaattttaaatgtaaagggaaataaaatttaaacacaaacagtacatgaagcagccatggtctggtggccatggtctggtggctgaggcaggctttaaactgtggacaaaaaaaaaaaaaatctgtggtccatttccagcaggcttggtgtgtgtgtgtgtgtgtgtgtgtgtgtgtgtgtgtgtgcatgtgtgtgtgtgtgtgtgtgtgtgtctgattctttgctgagaacgatagtgacttaattctagaaggctgccaatcgataagggtgggaagatggagtcatctgcctatgaggcagcaggcttcatgagtgagcaaggtggcatgctgggaagcctggcacttgctctccatgttcgtctgcctgtactttaagaacagaagccaggctaaagcgcagacaaggtctccagccccgtcgggtgtttcatcttattctgcattttatgctcccaaaagtctgacctagcttttgcagttatatttttgttgtttatagactgattccgtacagcttttgtatttcaaagtaactccccagttagcatcttcgtctgggtttaaagggcgttttaagccctaagtggagaaagttgcatctaactttactgcatctcctggactgcccacacatatggtaccttcaggcatgggggattgtcacacagtgatttccttctgacattgcctgctttttttttgtttgtttgtttgtttgttttgtttttgttttttttttaaatatacactttcctctaatctgaggcatttgaagcctgaaggggtggcatctcagaggccaaaaggctagtgccccatgtcagcggcctgtgcctgaccccagcatctgtaaggactgacccttacacctgccttgcccacatcagggatgaaggccagttccctttctcagaaggcagcctgttccatttccaccctgaactaattgttagcaagttctttcatctattgattgcaatatccttccatgtgacttcccctattgctgatctgtcccctctggagggccacaaatcacatctagaggattgcaggcttgggggatggagctgcctcacaagcacagagggcctggagcccatgctctgccattccttgcttgtctttactggaaacgaaaagaactccattatcgagaccaacccagaaatctttatttgttacattgtttccacattaaatggcataactgagtgtctgagacagccagtgcctttagatcctgccttctggtttttctctctctccaacaaattccctactgatcaatcattggtttcactgcatttttcagttaattattccccagcttttatgcatttttcctgagaagcaggaagggtacactgcctgtttctgtaaaacctctgtagctctcaaggaagtattaatctctaaaaatgatatagaaaccttaggaatattatgaacaagtatttaagaaactagttcagggatccgtgtgtgtttctggaatgaccaggaatcatgaaaggctattagtgcaccccaaaatagttgtggggaagacacacccaagatctttctcatttatttgatccaggccatccttgtcagcttatgttacaaaaagacaacaaaagaattttgtgaagaaagctcaatcagggacaaggctgaccatcacactatcttagtgatatcctctgtgctgtgattaaaattcccctacgcagaggaacgtaagggtttgttggggcttacggcgactcggggatctagtctgtcttggtgaggaacatgaggccgagagtgaacaggaagtgggggtggcctatgaagtctcaatgcacaaccacaatggttcacttcctccagccatgatctgcctcttgagggttcctcactctttcaaatggcaccaccagctggagagtatccaagcatctgagacagtgtgggacacttcacattggaagaggaattaggatgtgctagcaaattcttattctgggttgaatgtgttaattcttggttgtagtgcttgtgtattcatgtgtgtgtgtgtgtgtgtgtgtgcgtctgtgtgtgtctgtgtctatatttgtatgtgtgtgtctgtaggtctgtgtctatgtctttgtgtgtttgtgtgtatgcctgtgtctatatttctgtgtgtgtgtatgtgtgtttctgtgtgtctgtgtgtctatatgtctgtgtctgtgtatgtctgggtttattcctttagatctgcccactgacctagggttgtgttcttttatgaagttataagaggatttctggcacgccagcacttacttcagagaatgagcatcaagcaacaagaggttacatccatcaagagcttcttacagagcacagaggacatggcactgaaaacctatgatgccctggtcattcagaacgcttccgatatcgcccgggaacacgacaggctccggaaggaggtccacactgcctaccacaggaacagacaagaggaaggaaccaagaggtaaggtccatctgtaaccttacttacctacaagatgagtcctgggagtcaggcgcttctgatagcctttaacacaaatcacaactgaagagagaatggctggggaacaggccgtgtcagcccagacattccagcaatctcaaggttgctttcctgggtgatcccctcatggaacacaatccccacgtgtaagtttagtcacataaaaataacattgttccattagccttgttgatgttacttaagcattacacaaagctcagagctagcaaaatcagctagcaagacatgtaacgttcttgtgaggtacaaggcatataaggctggctaatagaaatttctggaaacctgtctgaagaattcagacaccactttgaaaatgtaaaagtgctgaataaacccctatgtatgaggctcaagcctgaggaggacagaaccaggctccttgcacaggccttcatgactaggtagctgtcaggttttgctaaaatctggggaacctcccatttctctctgaaaatgactctctcctgccatcactgcctgcgtagaatgattttgttgctgttgttaaagtggaaatggctaggtgtctttgctaattagcctccaatatcttagtgattaaatactggaaaaaaaatcttcttttgtacagaaagcggtaattaagcattacagaggaaacaagtcattcaccaggcagcctcgcttcatcctccgtgacttcattttctacatgggcagccagctcgcatgctgctggtttccagccctgtggatgctctgacactcacagatataattatgaagcagatgagaagaaacccgtggtgaagggaacccaccagtgtctcacaagattccccctgcccatgaaggcagaaagaaaagcgtgaaacaagctgactaactactcattctcaatggcttcccaaagcacatttatcattttccctactggaactaaacagccattccaattccaccatttgattatgtgttttatttgcccgatataaaattaagtaaagaaatgtgtgcctgctatttgttgataccagttctctcagtaccaggcaactgtgcagagtcacaagaagaatcataattccatacgtaattagtaattgctggtgagattagatggagagagagagagagagagagagagagagagagagagagagagagagaaagagaatgccaaactggatttaccttgtttggtgtggagtgtgcccgtctacctgacaacagaacggtgatgagccctgcacactggctgcaacactaactctctattaagatgggtttcccagaaattatcattcagattgaaattctgcctttttcatttgcttaagaatcagactgtgaaaaatccattctaggggatggctgatgggaagcgtgaagccctttaagtagctggagcattactgggggagccctgaaaggaaccacgatagacatccccagtgttccagcagagccaggcaggcctgggcagcaacctctgggtgagctaggtgctaaaaaccgaatgcagattttccagcaaggccagctagaaagggcccttgccaaggaactctctttgtgtcaggggaacgggctcatctctgtcacctgaatgacacacctgggcctctgtgctctgtggctgtttgtgttttgttttcccttaagagctgaagaccaaggaggatgcaggcacgtccactccaactccgtgccggtgcccatggtagtagacagcctcgcccaggctctcaccggaccatctacccggcccccatcattgcactctgtgttcagcatggatgacagcactggcctcccatcaccacggaaacagcctccacccaagccaaagagggaccccaacacccgggctgagtgcctcctatgaggctgtgagcgcctgcctttcagctgccaaggatgcagccggtgaaggttagccaaggagggggtgtggttggggggaagtgaatgctgttctcacatctcactcgagtgctgggttccggtctgggcgtgcccatggcaccactgtggccctgatacactttttaatagaaataaatccaattgttggcttgccagcagctttttaatcattaaatataaataatattcaaatccttaagcctcttaggggaaagctacttacatgtcagttccttcactctgggtcccacctctgtgttgaattaacggcttcaacgccaaggcagttctagaagttggttgctataccatgtaaatattcactaagtaattaaaaaggtaaaaaaaaatattcaccaggctttcctgattgtgatctaattaaaatttaagccccccccccctttttaatgtggtgagtgaaacggcatggccacaaaattcagcttgtgtaactttcagactaggcggtaaagggctctgagctgatgggtcaagaaacagttatgcagaaaggggaaacagcaactactctccacccactctcaaaagtcctgcactgtcagtgctccccggtggccggggctacaaccagaaaaagaaagcaagttcttccgaccaggacttttccaaacgtatcaggctacagataagatgcatggacagatcgcacggtgtgtggcgaccaccaggcacctaagtgcatgtgtccttcctggaaatgaaaagacccgtctcctgggggagggcaggtaataaaagacaacccatggtgatttgagtctcagaccattgctgtggagtgttggcgatggtgccattgtgcaagttcgaggagattcaggcaaatggccgagtagacactggaacatagcgtctgacggtatgatatggagctgagagatctcaatggttatgtgaattcaacgaaacagaaatatggcaaaatgacaatcttgatttaaagaaagatccaggatgctgactcctgacagacacctagagcatcggagattctctcagagtcagtcacactccttaggatcttactgcaacttgatgtgattggttgatatccacaggaggcctgcccgttttggaagagagagggagtatgtgaatagagatgggcagaggagaggtgtgggggggggggaagcaattaggaggacaggaagaaggggagactaagattggatacaaaaactaaattgataataataataataataataataataaatagaatataatggagctgagagaaagaaacaaagaaagaaacaaagagagagctggggagatgtcttgacagttaagagcactggctattctcccaaggacccaagtttgtttcccagaacgcacatggttgcccacaatcatctgtaacttcatccagttccaggggatctgatatcctctgacctgtggacaccagacacacatgtggtgtacatatatacctgaatgtaaataaaaattaatatttttatagaaagaataagataagggggctggagagatgcctcagtgatcaagagcactgactgctcttccagaggtcctgagttcaattcccagcaaccacatggtggctcacaaccatctgtaatggaatccggtgcccccttctggtgttcctaaaaacagcagcagtgtactcaaatacataaaataaataaatcttttttaaaaagaaagagtaagataagaaggtttttacagaaattttggctcaaaagtaaaggctgctgttttgatgcaccatgcatttccaacccttttaggaggagctgtgggagaaactcatgtgtcctccatgcatgcacagggtggagagtctggtgcaagacccaagaggcctgcacaaaggagagcagtggaggccagagggccatgtagagggtctgtagtcgatgtccctcccagatacagtgactgagaacaaagcttggcaggaagctggcttgctcttcctctgggcctgtgagaatcagcttccagtcatcacaacccctaagacatgggtgacaagggggggtccacagggagttgccagtgccacagctagagggtctcggctccagatctggggagagggggggtctcagaggagtgaggcgaacaagaagagaagatgcttaaacaacatgggcaattagacagacatctagcactctgagattgaacaccacaatgtctatgaagtcaggccccatttctctttacaactagcgagcaggctcaatcatcttcctgcgtaggcctcagactttcttgtggggcccaatccaaggtccccaagttcatgagtatactagggagacactgtcacacagatatgaagaaaaggaaaatagtgagggagcatgaatgcagaaagggtccatgccctgtgctggaggcagacacatgtgaataataacacaagaggcactgggcccaagcagaaccacatagggagaactggaaaccaggagctcctagacctatcctcacagtctctggtcttcctcttactgcctttaaattcttgcctggaccatgtcttattttggggggctgataggaccaggttgtgctggtatggatggtgacttagataccaccaatatatctaaacacagaaccccaaagggaaatatctcgtgagtggagacatgtctgtcctcccagagcttaggacgtattgaccgtgacttcaggatggctccggtgggagtgaagtctccgagcctctgagactggaaatgcagcgtgccttcttctgagttgtcagacaccaaaacttgccccaatgtcccaccctgtgaccagggttgttttgggggctccatttcattggcattgtgactattttatacgtaaacttagaaactaaaaaaaggaaaactcttgaaataagtaaattttaattgtccccacatccgtacttgaaaataagctaatcacacgcacgtaccctgaaatagccacaagaccaaattaggcttcagtactctaactgtggcttccctaattttagcttatgaagagtaaagattcctagtcctggcccacagagactccaaattaatactgagagggtacagcaggaagttgtgctccccgcagaatcgctgcctcactccaggcaaggcacctgctgaagcaccagtcatactctgaggagcactgtctaactcttccccatggttaatcgcctgctgagtagttgaaagaaaagggaaggggtgcttactgacagaaggggctttattctcagtatttcccatcctaacaacagcctgtggcaaatcatcatggccctgtgcaggtggggaaactgagtcagggagcaggatgcagtgtgccctcgtcattcagacactcagctttgttcctgccagggagactctagaaccctgtttcttggctgctccatctaactggctctgcatcatagaatacaaaagactttacctctggaggaagcctagaggggagctacttccttgatttttttctagtgttgcttagcaacccacccaaacagcgatttaaacaagatgatggctgttgctctgtctctcggctctgggtctcaggagatgtggattgtctggtggttcgcactcaaggtcccacatgaagtcggctataacagtatagaatcaggtcaccaggtctggtgccttagtcctgtgacacctcagcatctaagggtttctgtatctctagctggtctctgcttttgctttgatggcatggagacttccagggttaatgtggaaaatcactcaccatgggagcgggggctcgggggagatggattaagagccaccttttacgcaccacctccaggaggtatgaagaactgcttttgcctcacctgtccaccagaactgttccagcatcctgtctaggtttgggaaaggagatgcacactcaactaagccattcattctctactcatagagtcacctaggtgacagtaggaccacctcccgaggctcccaaagcctcctttctgtatccccaatgcctgaggtttgggctaaagttccttaaacagtgagagttcctgactccttcaaggtcaaggttttctccttgtgttcacttgggtaaggttcatcattagacttgtgatataaaatgatagtccacgtctgctaggcagatatgttcctgcctgagaggagacatgaggccacactcacggtctctgcatgacatttagaacaacagtcagctggtgttgtaaggatctctatgggaatggagtcctgcccctgaccatcatttccctaggctctgaggctgatgttctagggtcttaggtgctccctttgaattacagttcttcaacttgacagtgatgtagccttatggctgctgctctcccagcctgttctttgcacatgaaattctagaagccagagtctcttcttcaggcacagctgctgccatttttcagggcacatggacaaagtgcctttaagcagttgtgtgagctgctcgtgaatcaattcctaacacatctcattagccagcagccatagccacagttctcctgcattgggttttcttcactgtccatgccaacgcttaggcccggtggccttggttctttggagctcctttggcgagatcaacgcggaacaacccaggtctttctgcagtttattttttttaattaggtattttcttcatttacatttccaatgctatcccaaaagtcccccatgcccccccccactcccctacccacccccttccacttcttggccctggcattcccccatactgaggtatataaagtctgcaagaccaaggggcctctcttcccaatgatggccgactaggccatcttctgatacatatgcagctagagacacgagctccaggggtactggttagttcatattgttgttccacctatagggctgcagacccctttagctccttgggtactttctctagttcctccattggaggacctgtgttccatccaatagctgactgtgagcatccacttctatatttgccaggcccgggcatagcctcacaagagacagctatatcagggtcttttctgcaaaatcttgctggtgtatgcaatggtgtcagcgtttggaggctgattatgggatggatccccgggtatggcagtctctagatagtccatcctttcgtctcagctccaaactttgtctctgtaactccttccatgggtgttttgttcccaattctaagaaggggcaaagtgtccatactttggtctttgttcttcttgagtttcatgtgttttgcaaattgcatcttgtatcttgagtattctaagtttctgggctaataatatccacttatcagtgagtacatatcatgtgggctctttgatgtgtactcactttctgcagttttaatggatggtgttgttggcaaagtgctgggctccaacttcagagcaggtttcatggaggtccaggtcctttctccatgttagcataatatgtcatcttcgcagcacaccgagaagcactggtggtttcgtagatcaagaaagccctgctcctttatgggaataagttcttcgtcacatttcttcattatcacactggaaggactctagaagcagctatgtctccctgccataacaaatccttagcagggccagctagctattttccccttgccctctgactacagcctcaagccctgcccagctttgtatggcttcttcaagcttctaccccatatctgccttggctcctctcagagctttctcagggccctcaggcttcaacactgactttctagagtgaggtcactgtcaccatcaggttccaatatctattctatgtatctgagattatataacaaactttccagaaggcagtgactttagatccaaggattctggcagcgttctcttgtgggtctgaccagtcatactaagcagttctctgtacagtgtgatcatgggtgtctttgaagctcaggcccttaaaggcatggctcatacatttctgggtttgacaggaaagtctttggatagtctgacctcagtccttcacctccacaaggcttctccctccttgaagcatcttctccacacggcatctctttccctccctgaggcctcgtcacacatcctgtggagggtctgctgtgaggagctcacactgctcaggtgaactttgggttccctcagagcggctcctgctacaatagtaagcaagcagaagctacgctgacagggcccagcctcagaaaggcaggatgtcctcaacaccaccctgtcagcatctctctctgaggcagctagagtccctcccacttggaagccagctggagaaatgtcttccactgtagatctgctgctgcaggtgtctgtgaagtggctctgcagtggtgctgatccaactgccttcctaggcagtctgggaaaagctcgggagctgccgtggggtcagccctctagggagatggagtgatgcatatgcattaaggaactgggaagttagcattttcctgttcctagtagttgtctgcctgtgggaggtcttgtatgataccgtcacagaacgatggctgtgaaggtagagaaccaatcatacttgtagccctttctattatggtgtgagcacaggttggaatacacccactagtctctgaaggggtggcttacctatgtgggtgcccacattgaggctgaggatggtccagttatcctgcacaattatagtctaaacccctactcatttgcaaacatcccgaaccctccaggccctgtcaccctggagagttggagcctcatcttaacgcatctgctgcagctccatttctgtggaccatcttcctctgtgtgtagactgcatcttgggcaccaagacctatagacagtttcccttagtggcctcaagcgtccagggcctcctccagactcctagaaggtagaaaaaacacgagccaggatctttcctgctcaaaggacataagggctggctgtggcaaacaaagtgatccagggcagggacactcaattccatataggcctggcttccctgggatacactggttactgactcttctatctctgtcttccgccttagctctgacacggcccagaccccacagtgatgactatagcaccatgaagaagattccccctcggaagccaaagagaagtccccacacgaagctcagtggctcttatgaggagatctggggaccaccacgaccttctggcaccatgggccaggggggcaggcatcaggccccagggacactgagtgtgcagtgggccaggcctgactcagtgccgcagtgcacaccacagctgcctctgcacctgccattgccacagggcgactatgacgatgatgctgagcctgtgtacatcgagatggtggggaatgcagccagggcaggtggatctgagaccgacagccctgaccagggcgagtctgtgtatgaggagatgaagtacatcttgccagaggagggctgtggcctagggatgctcaccttcctgcctgcctcacctcctttgtttttagagactcgaaaagccatcatcttggaggctgctgaggggaactgccagccctcaaaggatacatgtgacatccccccacccttccccaatctgcttccccacaggccaccactcctagtctttccccccaccccagtgacccgctccccagcttctgacgagtctccactgacacccttggaggtgaagaaactgccagtcttagagaccaacctcaagtacccggtgcagtctgaaggctccagtcccttgtcaccacagtactcaaaagcacagaagggagataatgaccagctggcatcccctggctttcctgtgtttaatgggcccagccgaatctcaccacctgccacaccaccgccacccccagggccacctcctgcaccctgtgggccacctcctgcaccctgtgggccacctcctgcaccctgtggaccacctcctgcaccctgtggaccacctcctgcaccctgtggaccacctcctgcaccctgtggagcggcctctgcatcctgtggggtggcccctgcaccctgcaggccacccacccacttcgccttcccaccagagtctgtcctggtcactgcagctaaagcgctgactaactcagacctgcccagaacacagccaaagcccagttcggccccagtaccgggtccctgcagctcctttgtcaaggctccatattcaccgggaaagacagccagagcagacctcaggaagacctcatccaccttctctccaccaagcccttacagcccacccaacagcagaccgctgtccagtcctctggacgagctggccagcctcttcaactcgggaaggagtgtgctacgcaggtctgcagtgggacgaaggatcagggaggctgaaggtaagcagaaacccagtggattcctagtacacgtgcatagcataagccacatctcctgtgcatggccattcagagtaagtgttgatcgaaaacctggtctcaggtgaccagcagtaataagcttggaacactttctgtgacttctgaatgccacgcactggcatgacttaacaaattagtgtttgagcatgtaaaccagggcaaatttgaacagcaccttctcagttttgttggtactgttgttttcctatgacacttcctaacagcttgaacatggtatccttcgctggtctgatgttgctgatttgtgtttgatttgtttattcaccattcatctccagtgtccttctgtcccatgtgagtgagtatcatgctggcacatagtatctgacattgtcattggtccagttgctcctttgtccctaatactgctcacctgagtgtggccctggatggttgttttcttctctcaccaagcaacccaaggaagagcgagggctagttctgtttttgttttctcactcacagctcagttgaagggactgtctgcagtctctgaccattctgatgagctgagggttaggctgctgcaactagaggcagctgccagcagtaagaaacaccctgtgttctgcaaacaaggaatgcagccagcagcaccagtctctgaggatgctctgacagtctctgatgtggagaccaccacatctccttcatccctccatgctcagtgtgctgcgcttgcatatccaaaagccatagaggaatgaatatatatattattcttttgcaaaatatcttctcaatactcttatcttttggagaagaaatgaggcatctcactattccaagaagaagtgtatcagctagagccccacatcccactgaagatggagacacctggtgcctgagcctctgtagacaggaggcatcttcctcagaggcagtcacaggaactgactatagaagtgggacccagagcacagtgttttgtgcattcatcaatttgctcattcttcaaggagtaatacataaatattctagctcccctggtttgatgcaagaaggatcgtacataataaaattagaaaaaaaatgaaaagaaattaaaaaaaaaaaagtaggccaaagcttaggacctctgacaaggagataaataaccagccatgcctcggtgcctaatggtttgtttaactaacaatctctccttaattataggctattagtaaatgaaagtatactggtaaggaacaacaaaacgttgtaattctacaagtcatgttttatcccaacaaccaaaatggaccctaaaaagaaagcattaaataaggtcaaaaatattatttgaagctagaactaaaagttctagctaaaagctagaactaaaagtcccaccaaatatgcctttctataggtcagaactgggtagattcctctctgtcaaaaagcagtgaagtccatataagtctagggagagcttatcacttagaaacctcaaggaggtttctagcctggggatatggctcaacagttaagggtgcttgttgctcttccaggggatataggttctgttccagcacccacatcaggaagctcacagccaactgtaactccagcaccaaggcatctagagccctcccgtagcctctacagcacagatgcacacagacacaaagctaaataacaaaatagatctctgcaaaacaaagggaaacctcaaggcagcagaacagatgaggggcatggcaggcctccaagcatggcctgtgaacctgctccctcccccaggtcatatcaaccagccagcattgcaactgaaaagttgtagcatatctatagccccacttcgagttttcacaaaatacattctaatctgaaaaagaaagaaaggaaggaaggaaggaaggaaggaaggaaggaaggagagaaaagaaaaaaagaaaagaaaagaaaagaaaagaaaagaaaagaaaagaaaagaaaaggaaagaaaagctgctttgaagcatttatgatcacttctgtaatatcaggaatcttaatgacatgagcctcggctgttcccacccagatgcaggagttcccaacatacacttaatggaattttcccaagcctgtgagggaaatgggtttatacgcttgtgtgacatgctcccctgagatagagcagggcgatctctgagactgtgaaagggttatggtaagatagggaagggagagatttaatgcccctgccgtgtgctggagcagcttacatgattattaaggcttacagggtttcatcctcaggagagaaaatccactttctactgagggatccccggggttaccattcatagtgaatcacagctcaggctcccaatcgtcttctcttgaatctttattttgaaagacatttttatatctaaagtcatctagtgtgtggctaagtctcccttctggcaggcatcagtggtagctcccattaatacctggatggctgtgaagcttggagattggcgcgcacgttttgcagagtgggctcacagggtttcttttgctttttagcatggtgacttggagagcactaaactgtcagtgaatttcccgttgcaggtattttgaacacaaatgtgttatgcaatagtaagggagaaattgtgtacagaagtaaggtcggttctctggtatataattctatcccaggactattctggagacctccttgtaggatttcatgaataacagtgtacattaaaatagttcactttctgtttatctttgagacagagtctcaatttgtagcctaagctgacctccaacttatggcaaccctcctgccttagcttccagagtggtgggatttaacaggcacaagtcaacattccaggctttagatttttcttgtgagctaaataatcatggacattctaataatacagaacacagagttgggggtggggagaggcacatagacctgactgaaaagattagccatgttggactaacagcagtggggggcttcaggcaccatttttaacagcctgctgctcccacactctattctgagttaactactacgaatatgcccataatacaggtggggaaacagaggctcagagaaaagataagcttgcctagtgttcctctacaaagcctgacagagcagtgggtctgtccagtacagctctttccacaattctttccttgatgctgcctgagaaaagaccaggggtagaggggttaaatacatattttattgcttccgtgtgacagtaacagtcacagagcttgggtgagaaaactcaagactgttgaatatgtacttttcgggttacaggtaaacagtcctataaattccagagacagaattagaccagttaagccattgaggtgaaatatgaccagatagttatttgcctttgccctgtaagagctaaagtttcagctaactgccacagggttttcttctgatgatctgagaatcaccatgctaattatttctcgttgcttcctttgaaaatgtgaggcccttttcaaatggcaaaggaggcttggccaggacaccaggaggcgctattgctctgagtggtagttcccggcatgtttgtctttatggactcttaactgaaagtcactgaacaggatcccaggaagatggggtatccacggaatacagcgtgtggtagaagtctgaggagaaaagtagaagggagccagacagagctaagatgagtttgattcacaagttattcccttaaaacacaacgaaagcacaacactcatttcattattccctgaccccgtgaatccagagcgttccagatgtaaacaagtacttggaaatgattacagcagaagactactataacatgtcttccatacagtagctgggttgactactgtatggaagctctaccttctgtagaggccaagaggcacatagaggcttaaatatagacggaggcatagatatacagatatttcctagatccagagcctggtagcactttcatttaaggcttgcttaatccaagtagaaatcatcataagtttctgatattctactcgattatataaacatttcagataaagaatattttgagtttggaagtctgtattttataaattaaatcttacagaaccgtgtttttattttcgaatactgtttgttttagaagggctttaaagttggcctgtggaaggttttgagtgtactggagggaataggttacacaagtaagtaccttgtggtctgggatgctttgtctttcttttctcacaccactccccatcactgggtgaactggaagtgcacgctggggctcaacctttgttaatatttataaatacctcatgtttacgttcttcaacaggaaaggtatattcttaagtgtctttacctcagacagtcactgcacccagtctaggcccatagggtgcccactacccacaacaaggctgattctggaagctagggttcactattcattgtataaccacagcagtttgcatgccacaaaacaaaacaaaactaaactaaactaaaaacaaaaaacaaactcccaacaagattccccattccatcttgtcttacgcaggaaaataaaggcagcggcggtatcttgattcaacattttacaaagcgttgatgcttctgtgacaggtacaatgctgtaccctagacactgcttagcaatgagaagcaagatggcgcccgcttcctggctgaccagcaggattggtgtctgcttactcatgctccttgtctgcaagtgcctactctccactggtggtgtgaaatttgaagcggaaattccaatgttattgttgtttaatccgatacattcaaatgagttggcaccacacggaattagtctgcctcatgcaaatcttgacctcaaataataggaggcatctccccggcctcttgcccatggatagatcttgtgctgtcttgtccgtggctgctctggtttccttccacccagatgccgctctctgtggtgatgtacttgggtgtctgcatgctccttggtgcctgtgaaaggtagctccaaggctcatgaatatttctaaggctgtagacagcacacagttcactgctgtatgaatcttctctatgacctgcacccatccacagcctcccttcacacagaagtttccctcttaggcacagaaagcattgttcccttgcattctggaaccatcttgcattaacactacactttcctcagtgtccaaatgaggaagtcttttggagagatgagataggtatcctcaaagaaagctggtcgccacttacaactaagttccaagaggaactgggcaacagttcttctctcaacagacctgtggctgtccccatacccacaggtatagtatgtctctaacaagaaggagtcctttcactaacttcatgacttccctgcatcaaacgaaggtatctgtacttgggagaggtggctgcgactttgagtgtttctaattctccgatgtttggaaacctcatactttagtcagttacactaagaaatgttctttggcgttttataaattgatcagtagccaaattgacccattcaaaggacagagctctttgtcccctatagtatttggaaacttgttcaatgcctagacattggttgtggtttgacattcatctcacaaattaccatagtttctctctccaaatacccaagaattcatataagcaaattgtacagccaggcttgtgtggacttgcagagtgaattccattacagtcactcagtaactcagactgtaagcacagggcttgctactgaaaatccaaaacaataaatgactaaatcttccgttgcctgcctcctcccaggctgtgtgggattcccacttcagagagaaaaaagcagaggaataaacctctaatgtgagggggatccatggctgggctcaaagtgtccccagacccttgagttcctcacatgcaccttgtttggagacggggagggggacttcaaaaaaatgttatctgattgtcacacaatagcagtaacctgggagagatgatgacaaagaggcaaagatgtgcctccaaagtacatttccagccaggatgcatgcagagcaggggttgtccctgtgactttcaggagtgctgggccagccctgactgacaagaagaaaggaaaaaggaaagaaagggatggtggtggttgggtttattttgatgcagaggcattacccggaatcctcatagaaaatacacagtgtaaggtgtgtaggctcaggatcctttctgaacatagctttggatgcaaggaaagaaaggagggaggacaggagacagccctcactgctcaggcccagcgtgatgtcaggcttctctctagaagctactttctgctttcctggtaagccctggtgcttccttgtctcccctccatccttagacgttagcatggccatcagaatctcccccacaacaaagtacaaagctccacaagaggagagagaaccaatgtggtgggggctgctgtgctgctacgggcagaccctcacatagtaggagcacccagacacactgtgtgccctgtgatggcatttgtccctaagcatagctgctgaagtttacctgtagctctctccttgaccagggtgctgaggagcaagctgaggctttcagcattaagagctcttactccataatcatgaaatctaacatcttagagtcaggagtcaaacacacctcccaaccccactgatgctaattttagtctctgaaaacaattaacactaaaatagtgatgtgaagaccctgcctgagaaagtagtttccttctgacgttaaatacaagcgcattaccctggagccgatgtggcaaacagcagaggaaacctataccttattgtcagcattcccgacagacatcaggactaggctcatggatgggaggttattctagaatgctgttcctatttcctgtacagccctgtcccaaagtccaccaggctgcagttggaccctgcacagatgatgaggctagtccaccatattctgagatagccttactccctgtgttcctttccctggggtcccttccatactctgactgttattgcttggcagagaagtttttggatgtcaggttgacatgggaaggacctgcggtgggtaatttggattgctcctttgactagtttaaggaacacctggggcaatagtgaggcgtacacctgggggcgcctgtgagggcatttccagagaggattgactgagcagaaaagcctccctgaatgtggacagcaccatccctcgggctgggtttctggactcagtaaaaggagaacctgagagtcagccttctctctcagcttcctgactgacagagatgtaagaaagcatctccctgccttgacagacaggagctggcccagccaccatgccttctctgctctgtcagactgtaccccctgatccttgaagtcgacgtaaacttcccaccctcccttcagtggcttcttgccaggtatttgatcaccacaaagaaaggaaagctaatgcagggttgagttctcatcactaaaagcaaagcacactgaagccccattgtggcctacagaacctcgcataaaaggcaactgactccaggtaggaatgagggcatcggaggccatctcacaagtaattgtcagacatctaatcaggacacccagaaattaaacaagcaatgagtcagccctcagcgtgagctgggaaggatcagaaagaccgtgcagatggatggacagtgaccctcagcagctacctgatcagaacaggagaaagatcgccccaatgcccccatatcatctgcagcaccaagcattctagaaaaagatggatgggactttggtcttttccaaatgttgtggacattgggatggagttatcgctgatagtcagccaagtgagaaacaagactagaccaagagctaacctcacacctgtatttggctcccatgggggccacctttgagaaaatgttaaagccaccccatccctgatgatgtcacttccggttgatcctactgctttatgattctgtgatgccttgggggggggggaagctaagcagaaggttagacagttaagcatttagttagttcagtgtgatttggttacctagggaaactgctttctcatctcatctataaacctacagcagctaccgtgtcagtcagaccagggctatgcacctggcataaataggacattggttttttgttgtttttttttgggggggggttaagatgagccaaatacatccaagaagccatcaggcatggaatgcattgtcagcagcagagtctggtacccaaaactctgaaaatgacacagtagcttcagagaggggctgcctttcataaccagcaaaaaaataaagaaaaaaaaattatactgtcaactgttaaagcaagcacctattgtgtatgctgtgcctctactctggactataaattaaagtgccattggaggctcacaggagaagtctggtgctccattctgtaagccactcagcaattcttaatcaggagaaaaaaagccaccaccacctccacccccacatccatgtccaatgatctgcacttcactgtggatgcatagcaccttgcctggcatttcattccttttgtgaggaaatggtcagacatgatgtgcaggacaggatgccaccataaacaaagcctgggagatggctgagcagttacagtgtttgctgggaaatgtgtgaagatgtgttctgtctagtttcgtgtcaacttgacacaagctagagtcatttgaaagagtggaatctcagttgagaaatgtttcaaaaagatccggctgtagagaattttcttagtgattgatagggcgggggggggggggggagtggggctcagctcactatagtgtcatacgtgggctggtgttcctgggttccataagaaagcaggctgaacaaagccatgaggaacaagccagtaagcatcactcctccacagctcctgccctgtttgagttcctgtcctggctttctttgatgataaacagtgttatggaagtgtgagccaaatatattctttcttcccctacttgcagtggcgtttcatgacagcactagaaaccctaattaagacaggggctaggatcctagtaactcaaataaatccctaacaggcatggtggcatgtctgaaccttcaacctctgaaggcaagaatgggcgacactccatagagcaagctgcctagcaatatctgagctctgggcttgattgagagaccctgtgacagggaacatagtggaagaacgatcaagggtgattcccagcatcaacgtagggcctccaaatgcaggatcatattcatgcaaacatgaatacacacacacacacacacacacacacacacaccaacacacacatgcatcatgccaacacacacagacatgcatacacacatgcacacatgcacacactcatgtgcacacacaaagagaaaaaaaagaaccaaaaaaaaccccactttacctacataaggaccaaagctaaattcagactgattcataattatttaccaaggtaattacctccctatgcctgactgtaatcatttctacaagcagcctagaaaattccacacagtctcagagctgaccacacccaatatcgaattgtccagggccttactcctggagcaaactacattcgcctcctttactttacagttagttcgggccctaactgtaaaaacctggtttctttttgagatctgtagtcttcttttttataccctggactctgttagtttgtgaatatggtaagaggtcacaggacaacaggattcccttttgtccccacactgcttacacccagccagggagtggggccaggccacagagaccactggtacacaacatagcacaaattgtactgcagtatctgcaaatttaagccttacccaaagtcccatataaacaaacaaacaacccaccaaaaggatcttttcatattccaaacatggcttgggttcaagtatactcatccagagaagtgagtgtttcaaaggaaccatgtaaattacagatctcactgatgtaacaaaacttgtgtcaagaagcaacttaagggtaaagggtttgccttggctccatcattgtgggaaggacaacagagttgtagtagctcatagctgtgccttagatgtgtgaggttgcctggtgacatgttgggcattgaaagagcacagactggggccagaaatggagcttggctataaccctcagaacctaactcctggcatcccacttcatctaacaacgtcccatctccatctctccctctctaactacaccaccttctgagggctggtgttcaaacacgtgagcctgtggagacagaagccagtactctagccaggtgtacttgcagactcacatctgcgtggctcaaagactctttctcagctccaggtttcaggcttcctctcctgacatgcagtataagctcaggtgtaatggggacataggatgtacacatgagtcacttgaccgagcatggccctgtgatcctcctgacggtccacacatccctaggggaagtaaccaacgcccagtagcagacgctataggggaaaattgcatcttccacatgttttttgagaatttttttagtgtttagctacttctatgtgtatgtagcaatagagtccctgagatttgtaatagataaatcaccccccagtcctcagaaacatgttacccacagtccctgacccacagagactccagctcagtctctgccctcagcacactgttcccctgactctgccacatctgcctgtaccacatgacctcagcactaacagagatctgtccaggtcacttaagtgccacaccagaacagatagcattaatttcattgtcaaggtgggggttctctgctgttccttcattcaggttgaagtcattactctaatttcagggtaagagagggtatgagggaaaggttttgtgcttgtacatggtgttggaagatcttcaagctgtctgcttaattgtggtcattagaaagcgtgccgatccgacccaactggaaatcagagtgtattcccatgtctgtgtgatctaaaacatcttatgagccctcagcgacaactttggaaaacacatttcatcgaacagataatgaaattattctttgacatgaattattctttctcaagacacgtagctccttccaggactttaaaaaaaagtcacaggttaacttcaggcaaaaaataactaaaaatcaaactagttattaaactagctatcgtaggaagtgttgttgtttgccttaagatttttcatagatttagagaaaccgtgaagaggaataattttgatttattcattcaagataacatgtgtggatctctttggtcccaaagcactgtctaagttgcatggatttaatctctctctctctctctctctctctttctctctctctgtgtgtgtgtgtgtgtgtgtgtgtgtgtgtatgtgtatgtgtgtgagtgagtgtgtgtgtgtgcacgtgtggtacatgcatctgaaccctagtgtgggggctgcatgtgctcatgtatgccagagatcaacaccaggtatttctcaattgctcaccaccacagttcttttgagtctcatattggacctcattgatagacagatggaccagtgagtccctgcctccttcccatctctgtctctgagcactgggattacaagtacacactgccatgtctcactgtctacatgggtggaggagatttgaacttggatcctcaggcttgcacagcaacactttacctattggctcacctccccaagcccaggtgcaagaggagagtgtgttttccttgtaaacagggatgtctgagacccccccccccacccatgtcgcatggggatggcatatgtgtttcacagaagtcactcgaccttcagactagtgaaatttccactcagagtgctctcttccctttccttttgaagtgcttatccagacccactgaattaattcaccaattcacacacccttacgtcctttcgatactgttacagcgggcgggaatagcagatcctagaggcacaagagagaaagtaacagggagagaggatacctgtcctctaactggaggccagagaggggctcatactgggaggatttataacgattgtgatactgcttttcaaagtcagcatcaggctacatggaacggacaaattgtttttcttgctatttacgcagtctcactgtgtagcctcagagatctacttgcccctgcctccagtgctgagattaaaggtatgtaaccatgccagtctggctttctttttctttctaaatccagtttcttacaaacataaaacaggttatacagttttctgaattctggagttcttgcatatacctcatgacatatcttgggcatgagacccagtgtaaacctgaaatccatctcggttatgtgcatcttgtacacataacaagagggcatttcttccattaatttgttcacttacatctcagtttcaacccctttccgcccagtcttccccctcccatagctcctttctccactcccaccttctcttctcctcccagtcttctccctcccatagctcctttccccgctcctgccttctcttctcctcccagtcttccccctcccatagctcctttccccactcccaccttctcttctcttcccagtcttccccctcccatagctcctttctccactcccaccttctcttctcctcccagtcttccccctcccatagctcctttccccactcccaccttctcttctcctcccagtcttccccctcccatagctcctttccccactcccgccttttctcctcctctgagaagggggaggccctcccaagtatcaccccacacacaccctggcacatcaagacactgcaggattagtcacatcctctcccactgaggccagacaaggcatcccagttagaagaacagcatcatccacaggcaggcaacagaattagtgatgacccccactctagttgttgggagacttgcatgaagaccaagcttctcacctgctacatgtgtgtgggaagccagggttcagctcatgctcacactttggttcgtgattcagtctctgggagcccccaagggtccaggttagttgaccccgttggtcttcatggagagttcctatcctctttgaatccttcaatctgagctgcccacacccctaattcctctacaagagtcccagaactctatctaatgtttggctgctggtctttgcatcagtttctattggctgctgggtggaggctctcagaggacagttacaaagaaggtggttttatatggtattttgtaacaatgagcatggattcacactgtgtaatttttcactttgggtatatcaacactcagaatacctggggtccacatcatttctggtcattttcagaagtatattactcttcttggggttctttttttcacaattgactcccctgggtgctttatggcaagggaaaccccagcaccaactggccatttggtgatcccttctggtaggtctggatatgagcccacaggtgattcagttgtcaccttcctatttgattctcatctctgcgtggcaggcatcctctctgtggcagtcactgccgtggttgagtgtagatctatgaatccatactttggagactcaaggaattatcagggccctgtctgtcaaccacaggtgcaacagagcaaaggtatttgagaagaccttgaccccaccattctagttcatttgtttctctttcatttctttcacgttgctgcttcttcctggcctgggtggctctgccagaggacttgtattactcgctttccgtctagaccaggtgtgacagccttgcacctgaaggttgagggctctggcctttccccttgctttccccttcaagtgagcagcactgtttgcctgaagggctgttggccaccatactgcctctgtgcaccgtcttgtggcttctgaatccgcagtccacctgctattgagggtatgagagcctagcagctctatcagagagaccataccgcctagaagatcacagttaatgatagctcctgacagctggttctgggttcaaggattcccgcccccctccatcctttgtggcatattttgaataaacaggaccaaaaaaaagagatagttaaatttaaagggaagttggcaggacttaattttctgtgcattttctgggtgtgagagccctgtttacactgacagtcactccctagctttgccattcctgccttcttccctggctgggcacatatgttgttggagataaccagtctgtgtcctctgttggtgtttcctcccggaatgcatctctccacgcttggcagagagtgggtggcaggagctatgagtggggacaagcaaacattcctcttccacccaacccaacccaacccgctgcgaaggtaaccttgtctttgctgctggagaggcgagcaagctagaagagtccccttcctgagagcaggggcatcatgggaatggagctgcaaagcccaactcggggcacctgtgttactttgattacttatttttcctccaactcctcccagatcctccctacccacctaactctatgccctgactctttaaaaaaatcacacacacacacaaaacataaaccaatatatatagaaactaaagacaaaagaccacacacacacacacacacacacacacacacacacacacacacacacagagataaagactacaaagcatcattgagttcatattgtattggctagctaccctgcctagacttcttagagctgagacgatagagcaccattcagctttgtccacactgataattcccaggggctgcagggttgtgcttttgagtttctgaaatattacattctcacagaggtacctccagtccacctagtgctgattggtccagctgccacacagacagatgctgggttcctggatcccccatcaccagcattgctgaaacttctttcaacacacttctgccctggtcctcctatatgcttgtggtggattagaattatgctacacagagcagactccaggcctgcctgctgccttcttgtcattacacactcctccccttcaaaggatgctctgtccctctctcttgagtatctccaagtgggagatctcctagtcagagcttccaggaagctgatgtatttacagaactctttccactagttctgtctttctgaaagaacacgaggcaaaagcttgggccgtgccaaaagaaaacttgctacagtccataggctgcagctggagacaggaagggcagactggtgagagcctagactgaagaaaacacaggtgtgtgccccccttagggaacctgaaggtggagaagtctgtaggctcaggaacaatgggtcccagtaagttctgtgttctaaaagagtccttgtccccatgaggtcataaaagagagaagaagaaaaataagatctagggttctgaaggattaggcttgtagtgggctttacaaagagcaaaggccaacctcttaaaaaaataaacacccagtgctccacagctgacacagatggccctctccttatttgttgggattttgcttcatgtgtgtattgctatatgggaattaaactcacatgtatatgctcctgatatgcaaatgctgcaccgttggattatgtgagtgatcgtcttctgcagagctacgggagaattagccatatcagaagtcaaagggaggctgccccatgcaacacaggctaaacttagcctgacataaactcactgccagtttcaggtcaaagaaggtctgtccaggtcttagcatataccatctgtgtgcatttgttaccagggctgagctgtaattcctggatcctaaaagcgagagcttgggagggtagaggaggggccaggcccgccctctgtattttcagttttccttgatgacaagcggcaaagggcaagtgctgtgcctttccacagtagtctagtggccttcccaagacggattttcctgttgtgttgcccaggagtcgtagccagtgggagtaatgagtctgagccgcatccttatggattttctacctcgcatagcactctcagccttaagtcctgtagacagctccagtttggttccttccagcgttactgaaaacctgatcccagctcatgttattccaaaacatgagctgaggttatctcaggtaaagaaggtaactagcagaggatatatatatatataaaatcttttctcttaaagaaacactccactgcctgtccggtgtggtgtctgttatccttgactgaactgagactcttggctagtccagccccactccttgccaattcgagtcattccctgaccccaggctgctccttcctctctgtaagttcaccctacttgtccctcactgccttcaccttccacactggctcttaagaagcacccttcctgggagaaattctccttgcctaggggctttataatgagcacttctgttccgaggacagccgcccacgtctatccttggatggtggctagtgccccccccccgtgtgtgctannnnnnnnnnnnnnnnnnnnnnnnnnnnnnnnnnnnnnnnnnnnnnnnnnnnnnnnnnnnnnnnnnnnnnnnnnnnnnnnnnnnnnnnnnnnnnnnnnnnnnnnnnnnnnnnnnnnnnnnnnnnnnnnnnnnnnnnnnnnnnnnnnnnnnnnnnnnnnnnnnnnnnnnnnnnnnnnnnnnnnnnnnnnnnnnnnnnnnnnnnnnnnnnnnnnnnnnnnnnnnnnnnnnnnnnnnnnnnnnnnnnnnnnnnnnnnnnnnnnnnnnnnnnnnnnnnnnnnnnnnnnnnnnnnnnnnnnnnnnnnnnnnnnnnnnnnnnnnnnnnnnnnnnnnnnnnnnnnnnnnnnnnnnnnnnnnnnnnnnnnnnnnnnnnnnnnnnnnnnnnnnnnnnnnnnnnnnnnnnnnnnnnnnnnnnnnnnnnnnnnnnntcttccagcattgcctcctccagtacttctccttactgagggcgctcattgccctgcccctccccccactgcccagcccttctgcagggcagcagtctaaaccctgacggcttttctatttatggcatcacctccaagatcatgagcttttgccaggtgaatatttatccttcagctccgcacaaggcatttggaggaagccaggctggagatgaaccaaatacagcagatcgccctcccccacccccacccccacccccaatgctgcagcagatctggcttctgtccctcaggtccctcccattctttctgcatcccatgcagaggtgcaggggatgctgtcccctgcactttcccaccctccaggttctcctgtggatcttaagagtgagcctttgggggctctctgctgcaagcctcaggctcctgactaatagaagcctcaaggatatcctggaggccgttgatctggaggagtcacctgctccttctggaagtctgagaaatgacacccttgtaaggaaggcatttaggacctgccactgtagctcagagatatgagccatcccagccaccaagattccagagtcacatgtagctcaggtgaagaatgccagtccccatcaaactgactccagtgccccgaaagcaagagattataaagtaacataaggtaatatttaaaaataaacactcaatatttataggctgtgtgtactgactattctaatgacagaaactatagaaccaggctgggcattgactgcgaacatccagcagctcctcctcctatagaatgctgggctgcagtagaaagctctgaataagaggaaacagccagtgtgcagtggaatattgtccttatcttgtaatttgcaataaacagatgtgggacccaaaggcatgccgctgccaccgatgctcagccctttcccacctgccagcttccagccatcacctgcaccatgctaccactagggcttgctaggaattctttctgaaaacacagtggagtttaccaccgtgggagatgttggtggtgcttggaaaggaggccctgttgtcagtgctccttagtctccttttcttttcttcttctttttttttttatgtttttttttttccctgacattacaacatcttgctatggaaccctagcaaacataatattcactcgacagccagggctggtctcaaacattcagtgagtctcctgcctcagcctcctgaatgctgggattatagcttgcacaacactgtctatatttatctttcattctgccatgatttattgagttccctctacatgctaggcatgtaactcctgtaaacgtatcagaagatgtatttgaattagagatacggatgtacaagaggagggaggcagaacacaagcaagctgaagagaaggggtgtgccaggcctagagaaggactagggacaagcctgcggcggtcacctggaaggccttcctggtgggcatggagtcatgaatgaggtcagagctttccctttccctgaagcctataatctctggtggtaagaatgcaaggaagaggttaaagcttgcaaggacaaaatctggggctaacagagtcttggaggatcctttccatgctgggagacatttgcatcttaattcaaatgaacctagaaagggggggggggagaacactcggggaaatgaccttatttcagagcaggactttgggctccattctagaccagataacccatggtctgcagccagtctttctgggtaccttaagaggttttgttgcatctctacctaccagaggccagccccagctccccagccccagctgtgatggccaactaagaagaattcagacacttctgagtatccccctagatatacttttaatatacacccaaagtgtcccaaagaagacactttatttaagagcaagtagaagacaacagaattttgtgttaatgttgaagaatttgctagaactccctggactaggtcaaaagtcaatgcatacagagccaagcataaagcttgcccttatttttgagtcacatcctggtgtgattcattgcttctgaacccgtaccctcttcagtgagggctcaaacaccgcaggtattcaaaccatcaggtgttaccagcacccgacagaaagacaggatgaatcacacacgcacacgcacgcaccaaacaaggcacggccccagacatgtctcaggaaaactttaactctgacacagcactttccttgctcgcctctccttctgcttagtcatcaagactctccaatctcccccttcggaacttttcttgcccttcctccagcactgaggcatgaacaggcttgaggacgcagccccaggcaagtcctctgcttctctaccaagtgtgcatcttcgtacactgttggagaactctacagacctaaggccacagaactggggacttgtttctgctgtgatcnnnnnnnnnnnnnnnnnnnnctgctgtgatcctgtcggtgcctaagtacaaagcaagggcaatgcctttagcaaggaatgcagggtctggtcctataccagcccactgcttgtgcagtggagaaaaatatgcagagtgctcgaatctaaatgtcaacaagttaaggcatagacaccttcacttctctgggtgtgagtaaggttgtttttgagcagacactggcatgttactcataagccacaggtccatggttagtatggatgaaaacacaatcaccctgatgagaacagcaggtctgtggtgaggaatttcctctattacagtgtcatattttgggctaggttctggttcatcaccatgggacatcagaaataaggtcaaggaccaaagccgcctcagcctttccacctgcaaatgagcttatgaggaaaggccatcaacagggtaagagggcgcaggactgggtgcacagtggaaccctcggatctgggcctgcatgggtgcccactaggggaacatgcttgtaggaggattaatgtactgcctagccttgacaacaagagcgaccaagattctcagactcttagatcgttgcagaagcgtctgtccagctacactgctgacccttcatctggatgcctggcactaaggaacaccagaaactcccctttctgtccacagttaccctaaaatagatctgcgttttttacgataaaacaaaaccagcaggcaatgcaagggttgcaatctaacccaagtgacaagtgtctgagcacatggggactccagctgaacctgcggagtggaagcagggggatactttaaaaccttaataacaaaaatgaaggtttagactatggtgtcaatgtgtctgtgtgacagaattgggctatcatgatggctagcatcaatagctgagtgggaagaatctacaagccctggaagattgtctctttgaccattagatagagccagattctgctggcctctgttcacttaacctttcctgcacctgggggctgtcccgttcccctaattgtaaggcctccattcctttctgggctgcctctgggacatgagtggcaggcctctctcctcaccaatgtccccacttatcactcctttgcttctatgttcatagctcatctggacaagcactatatggttcctgggaaaggctagtccatttttgctgcaagatctgtaagtgttataaagtttatctctgtacctgcatcttccctctgcttttttttttctcttagctgaaatacctcctgtgaggatacagcttgacccagcggctgttctgcccctcaggtttttcactcagtcagggctgcattcctgcaagtgcttggtcggtctttgggtaggtttgcctgttggctggtcatccagccctctttccaggaggtgagcttcaacctacaagactatgtggtctcatttacaatctctagcacctagaaggtctggtacagcataggcaagcagacagtaactggacaaaagaatgaaaacaatagcacgacatacctacaggcgcatggatacatagccctgtcttaagagagctctgaagctgaacctgttttgtcggcatacaggagttctaagacttggccaaactgagcagctgtttccttagctgtaacactggccactgtaaggagcccacacaagaaaatcagcctggcttgtgtcaatgtccctgtggatgctgactgactccacaaagaccactgtggtgtttgtgcttgtgtctgtaataccacagagttggcctccccttgtggctcattggggataagtccctctgcttggtgtttgaaactgtgatcctttttaattgtttgtcttatctgatagagataagcacatgcaggtacttatagggttccaagtgatacttcgataggatacaacacatcctgagattttaaagtccgattacacacatctcctcaaacgggttatatttatttatggctaaaaattcttttttcgtagctttttgaaatgcatactacgttatcattgtctctagttgccctgctaagtgaccacacatcagaactactgtttcctaactgaaactattatcccacgggccaatctctcctctctctcttaactcatatgctcttcggctctaggtaaccatcactctcctctcaacgcctataagattgacatctttagattctgcaaatgactgaaatctgcccctggcttggtacattaacaatcagttctacccacattgccacaagtgaccaaagtttatgttttgtattgcctgatagcattccttcatgtatatatacttaattttctttaaccacacagctgttggtagatacttaggttgattctatagagtggtattactaacaacagcccagagaatatgtacatttgggtgtctctttgacatgctgatttatatatgtgggtacttacccatggggaggttgttggatcacatgagttccatactatgtgtaatagatataccaatttacatcctagtaagcaagggttctgtgtgtgcacacacgcgtgagtccccgtcttctgtctttcctacatcattcattcttctcagtgaagttggcactggtttcatttgtttctgtggtgactggtggtactcagcatgttttcatgtatgttcttgttcatgtttgttcttattctgtgtctctcttgacaggtgtccaggtctactgtctgttttgagtccagttacttttgtaattgattttttttggcgtggtgggggggagttccttgcatattctgtgttttaattcttcctcagatgtatggcttgtgaacgactttctcccagtctaccactggttgctttgctgtctcctttgctacgtgcaggcttatcagtttgctataatcctatttgactgtttggctgtgtttcttgtgctctggtggtctcattgtaccctctcccacccatgataatgtcctaaagcattcctctttctcctctagtgatttcataccttcatctctcatgcaccacggggaagaatttaataaatcattacaagttggtttttaactggtgagaagtgggagcctgtggcccccaacttggccagcaccatcatcagagtcgccgtcctgttcatagtgggattcctggtgattatgcagacattcagctggctatgggtgggcgtgcgctttatttnnnnnnnnnnnnnnnnnnnntggctatgggtgggcgtgcgctttatttctggactcttgttctgtctccttgttctctgcatctgtttctgtgttagtccacactgctttgttactggggctttgaaaggtgttttgaagttagtttacaatatgcataatgcctctggctgtgtgttctttttgctccaagtggccttaaccggtcaaggtttgaagtatgaagtcattttgccatgtttgggggagtaaaaatgtctaccccaaatgactatgtgtatttgaggtctgttatgtgtttatgtatccctaggactccaaactcacttcctataaagcaaggctagcacctctgtttcttggggtctgagttagtggggtcaaaggtgaccgtgcccaactctgctataaacaaagtataatattgcaaattatatttatcatctgaactggctagttttgtgtcaacttgacacagctggagttaccacagagaaagaagcttcagttgaggaaatgcctccatgagatccaactgtaaggcattttctcaattagtgatcaagggggaaaggcccgttgtgggtgggaccatctctgggctggtagtcttaagagagcaggctgagcaagccagtaaagaacatccctccatggcctctgtgtcagctcctgcttcctgacctgcttgagttccagtcctgacgtccttggtgatgaacagcagtatggaagtgtaagctgaataaaccctttccccctcaacttgcttcttggtcatgatgtttgtgcaggaatagaaaccctgactaagatatcatcccttatttaatactgtgttagcatcaaaccttagaaaggctccacttcgaggacagttaggattcgctaagcactgacaagagagaaaaactcacagcacactcagaggtagattgaagcatttcctgagggttataggagcactggggatcctaggaaagcaagaattcatgctgggtgcacctgcatgcatcagagggaaactgagtcaggtgtcaggtgatgtggagaaatgcaatacggagccacactggcagcagacacaggagtctgtgaagagccacaccgtcctatgctcttgtgcttgtcaaatctcgcttgattgactctacacagctttcaaagcgcccctttcccccttaggactgaacaatggcttctgttttcatacatctcaggccccttggtgagaaacattacggtgcccccctaagaattctctttgtagtgtagaaaatgtatcttagtgcgtttgaagtttagtttctataattgtaacagacaatacaggttttgcagtcttgttcaacatgcattttttttcagagctataagcttgttacaccaaatgtaaatagattgggcacaaaaaaaaaattcattacctgttcagcatgggaaacattataaccaactcttggatacaaaccagaaacttggactaggttatttagaaatagcaaattacaagttgctttcccaggcttgtatttaagggtaccatgacaacttctgttgactgctacctaggctacagatttcactaaggattttggggcatttgttttaagcatgattaatgtttaattagtctcttccagtgttttactcagatttgaagtacatcttatcagataagaataaactttctaaaatttattttaggttttgaaactaacatgaacctgagtagccgggatgaacccagttcatcagaaatggcttcagagactcaagacagaaacgccaacaaccatgggactcaactctccagttccctgtctagcgatgtgacggctgaaaatggaaatcctgtcaccaatggtgagcctctctaaatgcaagagccagcaggccaaagttttaagccacatgtactttggaggaagagtatatttaacagttaaaaatgaagtaggcttgggccggagagatggctcagtcgttaagagcactgactgctctttcagaggtcctgaattaaattcccagcaactacatggtggcttacaaccatctctaatgggatcagatgccttcttctggtatgtctgaggacagctacagggtgctcatatacagaaaataagtaaataactctctaaaatgtaaaaaaaaaagtaagtttaatagctggagatagaatgtaagctgcaaagctctgccttgggcatcactgtcagcatcctaccgctcaggcagaagagagtaactcactctcagtatgatgacctttcggaggtttggtgggatgccgctctgcaggaagcagcagaaggtgcttcttgtgctggggagaacatgaatgtccaaccaacgttgtagaattaaatgttttcacacagctaagaatgtgagaggacgtcatactgagggccttcagagggcagactggctttaggttatcaggtgactatcacttagaaaccagctgggctgctacatccgggtctatgcaaacagatgttttccctgatatggatttagtagtgactgatgggaaaatccagctcttctttcctgagggtgcccagaagagccctatgaggcatctctgcttactctgaaaaaggtggccagagagctaatagtcaaaggctgagttagggaccagaggccacaattctctttattgtttcctttgcttccatgaaagcctgactaaggagagaagactttatggcagcttacggttggagaagatacagcccaccatgccatggaagccattggtagtgggaggtgaggtggctggttccattgttacagcagccaggatgagagggagagatgtctgctggtccttggctggcttaataatttttccttcttatttagctccagaacagagtgtcacccacattcagggtatgtcatccttcctctcttaagccttaatagaatcaccatcctaagtgatgctacatccattcacgctgatgtcaaaagcaaccatgacagccacactagcccagcaaggcagcctaaatcttaggctctcctcctggggaccttgggaacactggaaaagcctaattctctgatagcagactaagtccaggattcactaaggccactgaggggggtggaactgagatgtagccatcacagaatcagttgtactagaaccaggaccatgggttagctaaggctcctctgaatctccaagttgggctgaggccataacatccttaggctcctggggaaaacctatgtaaatctgttccaaaggacaataaaagactaggccggttaatatgatcacaaaccaaaagacacagcacacaatgaagacttataagacctatgagcacaaaactcagatggaaaaatcagagacagaactgaattggcagtcacagtttactcataagagcttaaaaggtcagcgcagagagacacgtgccttagaggaagtgaataaaagcagaaattccatctgaatgggaacttgactgcccaacagaaaatggaacacacatcacagcaaagcccatacagggtgatgttgaatttgaccagagagttgtttaggtgggcaataggcaggtagtctctacagaaaaccacatgggattggaggaaatgatgggggcatgcacccagctcagtgggaaaggtggtggggttctggagaaagaggtggtgattaaccatagaaacgtgtgctagtttcccagcccttgtgaaagcatccaggcatcggcccaacttggtttgttatagagcccagcaaactcttcctgtataacccagacatgagcagtgtcaatacaagcactgagaacagatgctctgtacacttaattcataatccataaagcttaaaataaatttagcactctccaaactagtgagcagatgtctcattatctattgtcatgtgaggagttactctcccttctcccaattttgagagttaatacaacaaacggggattattttggatctgctaagggtcttctaaaacatcccagtaaggagatcccaggagagagaaggctgagtccctcaccagaagcagagctgtcttggggaggacttgggcttccagggagcgccccatgtgcttgactttgagtagtcacagtcctgcagatcaaacaacaaatacattagagaaggaggaagcaaggtaactctttaaccaaatatttcatctgttttgtttttaaaaaatcatcaaaacataaaagttacaacttaggaaatggtcgtaggtagattcaatcaaggtgactcaaatctctcaaggcagattgactggtggaagctgatgaatttttacaagcaccatgacttcctggcccatggtattttctcatatcaatgcagttccaggacctgtgtgttagagtctcaataagcatgtgcccattgaagaaacactactacttgcaaatgaaccactaattgctaggtagagagccagaaaaatccagtcctcagtgttacagagccatttccacacatgtagcctgtggcttgcttattaccacagaacctcgagagaagaacaagattttattcgattttattttgttttatcttgtaagtggggttgggggatggggataccacatgtgtgaaagtacccagggaggccagaagatgacatcagatattctggaacaccacaccctttagcatagtgtcatactgcccgggttcaaactccaaacccgatgcaataatatccaaacataggacaaaggtccttaacctttcaccttccaattttctcctattaaaaagcgtgatgcaagactatgccaggacttttacagggaacctagtagatgggcctaaccccaaagttagtgtttggtcaacactacctattcacaagctgtgagcctctcagtgtggaacctgggaactcagctagggtcctctggaagagcagcaagtgttttaagccactgagccatctctccagccccgggggatcaattttgttgcggatttatcatgcccatgcccagggtatagtcaatgtccattctaaagaaagcaccagaagcaagtaaatatttaaaataatttaaagttctggatgaggcagaaatagcactattttctaggaaatgatttctttggagtgccaggatctgcgtgctacctctgtttcccagaaataattatgtttgctcatttgctgaaatacagttatgtgtggctaattatagcgatcacttactttaattgcatcctttcgctgatgtgaacacagacttggatactttttttttttgtacttaattattccctggacttgtggttatttattattacattcgagagccgcctttggtgttaggacgcttcagctatatcaaacaaaaatattgtcaagataaagatgtttattttgtggcaaagcagagaaataaaaaaagttcgaactaggacattctacggtcagtatgattttctctctcgctactcaatggatatgcattttattgctgagcatcaggaaaaatggcaattaaagatggagtcattacatttgagtttacatttatctctcttctgtttatatgcattatattcactctctgtgtgtagtctgggttatctgctccaggaggagctggataaggaggaagaactgcttgttgatctcagcattgttccctttgtctggaactgagggacatcaggaccaagtcacacagacctggggttagcagagtgtggcttctgtcacacatgcctcaagagctggcatcttggggtaggtttccatcaactacgtgataacacaccttctccatctttatgtctgaaactggccagatccctcggtactcgcactgttgtctggttctagtcccaagagccagagtgaagcaagcatgcaagcctctacttcccagtcgaagagcattgcagttgtgtgcactgagaggcaggggggcctttgccggggaggagagctcctgccttatctgccaagccctgctgcactctttctgatcagaggcattttgaagtcataccgagtcatctctagtttggactttgtttcattaaatgttcttactggtgttgggaactaggggttgaaaacaggtcaactgggattatgctttgccatccttcctggggcttaaggcatcatcctgccaggatgcaaaaccaagatctgacatattagcacctcaaacatgggcatgatctttaagctttcacttctcaacctgaaaaaggaatgaggcaaactgctctgtcagaacttatatggggaatctaatagggcagcactagtccaggcagtgctcggtctacagtgcccattcactcagtcagcagtacccattcactcagtcagcagtacccattcactcagtcagcagtacccattcactcagtcagcaatacccactcagtcagcagtacccattcattcagtcagcagtacccattcactcagtcagcagtacccattcactcagtcagtagtacccattcactcagtcaacagcacccattcactcagtcagcagtacccattcactcagtcagcaatacccactcagtcagcagtatacccattcattcagtcagcagtacccattcactcagtcaacagcacccattcactcagtcaaaacagtgcccattcactcagtagttgtacccattcacaacatcttggagcttttctaagtttgcatggaggagccatgggggttataagtgaaacagacaaggagcatgttggtgaattgaatttcctggaccgtgcaggctgtaatcctataaatagcctggagcaacccaagtgtacatcctgcctggtccaaagttagtagaaacacattgaacaaggccaaagcatgcacaactccagagatcaagggtggacataaggttttgagtcaaattctctacacaaattcaaagatcttgtaatggtttctccatcttttctgtattgagaagcaaatgaagttgctataacccacatgcgttttcttggaatgattagtgaatgtgagcatacttattgtctactggtcatgtatgctacttcttagttttcgatgtgtgttctatgtccattccccccatacccccaatcttgattgaaagtccttttactgtgtgtatgtttaaacatactgagacttttatttaatgtacttcagtattttatgttgttcttacatttttgctttagtttgtgatgttttaagtatatattcattttagtgttcataatcagaacttttaatctatgtttcctgcaatgcttggtgactctggtgacatttttagataattttacttaaaaaggatattatttctataacgatccctaaaccttgggggcaagggatgtgatatacatgtccaatttagagctggatactctgtactctcttagtctctgtaccttgatcagtcatgggtctgtgtgataatgaccatctacttcaagaagaacctactcttttgagaggcaagcaatgatctgcgggcatagcaatgggtcctttagaattgtttcagtgtttccttagctgaagaatggcagtaggttcccctctaaggcctatgacctgtctagacagtacataaagacttcatattggaggcaatgggtaacctcaggagacagtgtcttctggacattgtagggcgattgcacacagcattcgggaacagcatgcacagccagacaaaaccccagcatggagaggggaggagggcgtaaagtcccattccaagctgaggggctattgccatctcatagcttctgggaaagggttgttggctttgtttaatggtgtgactcctttttttttttaatatggacagagaaagagagagagagaaagagagagagggaggggaaggggaagggagagggagaaggagagggagagggaggagggggaagagggggagagggagagaaatgagacagagagagatggggaggaaaagaatgaacacacatcactcacatcattcatgaagccatgaaatgggccgcataggggtgatgctggatctgagaagagttgggagaagggagaatatgatcaaaacatattatataaaattctcaatcagtaagatgttattttgttgatacatatatacacacacaatgcacacacatccatacacatgcacacacatgcacacacacatccacacacatgcacacacatgtacacacatgcacacacatgcacacacgggcaaatgcctaacctcctttacatttcaggattcctagctacctgtttcctgtcttgtgagattctctcagaaatgaaattctcccctttgtgccacaacctacaaagattttctctgtcccaggtatcccctgaggggctcctaccctacccttactcagaggagacccctctgctgtcaagctcctctgtttatccacctctgtcctcaccagcccccacctctacaaatacatccaccctggtctgttcccctctgttcaaccctgccacatcccaggtccatcagccttttcacccaggattttcataaaatgttgtcatctcttcttagaagtcttcagtgccaccaattgtctgcaaaacattgttacatccccacaaaatgctcttaaagccctctcatatctggctagctttcaccttccagtgtattctctggttctctgagatgggcttggtattttatgggctgttccttggacatcctggtctctcttgtctgtgctctcagctgggcctgcagttcccggtctgtgtcactgtgagacccttcccaggatcccctgtcaggaggctttcttcatggtgagcacctgcttctctcagagcccacccagccatacctgcattttatgttccatacttcccatgtggctatgccaacaatggtatgaggttgcttctccttggttacttcatatagagtcaacgaatatgctcacggctgagccatattcatgcacacaacccacattctctgctgggtgtgtgtccacactcatttaggcaaaccactctgacccattttccacagaggcagccacacttctgagttggctgtcctcagggagatgtcagcaaacttcctacaagtgtcctttaaccgtcttccaggtgggacttcttgcttcttcctgctcggaggccctgtctgtattctccccagccttgagtccattctattcttttctaattaagtgcaccattttcaaagaatgctcacaactatgtcttcactttgcccactgactctctgagaatcctgctttgcttctgccttggttctggatctgtgacggggtctaagctgacttcccttttcaatctccaaagtaaagcttcgaattcacacatcgttatttttgaaagatggatcccgcgtcctctgccttttattggggataagctcatgttgaaatacttggacccagctggtggtgtggttgggggagtggggcttgccactgtaaagagctggagcctccctggaggaagtggatcactagcatcaggctttggggcttcacagcccagatttgcttcctctttactctgcttcctggctgaggactcagtgtgaccagtgagcttcctccacctgccgccatgccttccccaccatgatggactggaccaccctaggaacgagagctgagcaagtgctttatctcttaagttgcttctgctggttattttatcacaggagcagaagtgactaggatgtcattacagagtccatgtttgtcctactctatacttggccctttgtttccctgtccccacccctggtctctcacatcctttatccaggagtctttctacagatggtgtcttgacatagacctgcagagtcccgtgcacctatctaagctcttgattatgccacacagttggttgatagcacaactatcactacctgtgtccaatatgccctctttctgttctgatggtgatcatcattgctcatgattaggacccagtcttttccacgggacaccctcagtggtggggcactgtttacccacagtcagccctgtcctgatacatttgtaacactctttatgggaagatgggaataaatatctattcaccccagacagaaaactgaaccaatgacagaccaaagtaataccaccaaaatccagctttaaaaaccagtgagtctattagggttacatataggaacaggtataactcatacacatacgaacctaggatagcccaccccatcaaagctggaaccctagagagctctgcatacgctacaaagcttaacagattagagggtctcctctcctctgcacccagcagtccttactgcttatatgaccttggagacgaatgaccttgtgaatctggccagtttcagagacttcctacaactaatgagttgttggcttcctgggtcttaactagttttgttttgttttgttttgactttctgagtcttaaggagtttccctccaggatggaatgtttcatacaggaggaaatggctacgggaagcattgacaggcctttttcacacggaggcctgtgtacgtttactcagaaggcagactggccctccttatgttgattggacacagatctccctgaggaactggcacactcctgtaattggaaaaatgcacagtgatttcctaatgatttttaatttaggaatcatgtatatgtttaatcaattaaactgtgctggttaattatgtttccagaggagatgagtaattgcttcagtatttaaagttctctgggttgaattcattccatggggcagttagttctccttttatctgttcatgtttattaatcaagtcacttggggcagtacatgctacctccatcatggtggctctcaatcattgtaggggaacagatctgtccccaaggtgcattcaataatgtctaaaatcattttgattgtcatgagtcagggtgaatccagtgcgtaaagacgagggatgctactgtttataatgcacaggacagacttagaacagagaattatacaggccaaatgccaagggtcagagacaggcctctgctgcacagaataatgaagaacatcacccgatgcctcacaggatgtctgtgccctttgcgggaggggtgtgtgtttttcctgaaaggccatgtttacttggtccttagctaagagctggtaggttgtaattggtcagttttaccttcctagctgcccagcatcaactctggtttccatggcacccaggtgggctcctgtgtcacgtttcttcagtccctgtttttcctctattctgccccggcagatgaaatgctaacattcatcaacatgcagttgggaaacactgtcagcctgcttctctcttcctagaagtgcattttgaattgtttctagactctaggaaaacgtccctccttcagtcacttctgtgctgatctgacctgtttgcagttttctccctggcagtatctctcttcttttgcttactgaaactacagtagcctcagatattcccatctagctgcaaaatttaatatctgctattgtctaatgggttagtgcacagaatatgacactgtctagttaactacatatgaacattgtttttccctttcgacaaggaggtgcaaactcactacagctctgtgtgtcgacttctacaggtttagctgaggacgatgggtgctcaaggctgtgtctgagtggcatggggacttcatcatttcagagaaatcgggagagccacaccacccaggtaaggacaccctgtcctccccacacagcaatgagtgtagtaaaaccatggcagacagccactgagtcctgttgatgggtctccttcctggtctgagaactcaggtagttctcactgctgtctgtgtgctttgtctgaacatctctctctctctcctccatctcagctggctgcaattttctgcttgttttggaaaaagaacaatgtccctgaacagctaaaagcaagcattttttttttaagtagcgtattgtagacatcattttgctgtggttctttaaaatcactagctgctggtggtgatggtataaaacctgctgacagggatggtgttttctgcatttgacttggggtaaagtagaagactatagggacaaagacttggaggtgtactgtgtggggggcttccaatgtctctgttaattgtgcaagcatgaaatctaagacccagggaaaagatggatgttgtagcacgtgtttaaacttcattgaaggagaagcagagatgggcagatggccgtcatttgccggctagccagcttagccttcccagtgagttttaggccactgtgagactctgtctcaaaaaatgaattcaacatctcccgaggaacaacactgaaggttgacctctaacctctacatgcatgacctctaacctctacatgcatgacctctaacctctacatgcacgcacacagacatgcacgtgaatctgcacacacatgtgcctgtgtacacctttgcacacatatgcatgcactcataagcccatgaacccatgcacatacatacacacacaagtacatgcatgataccatttactgtgagaatatggttaaattaaaaagccttgtgtgtttgtgaggattacatgttcatgcacaccctttttaaccttagatattacaccaaaataaagattattcgggataaaataataccctggtggttttagaatgcaaaggaatgcaggacgaagccatcttgtggccctaaggttagcgttcggggacatatttgatgccacgtaggcacagccgcattatgagctgagatctttctaagtagcactgatgaggtggcgtgaaaaaaaaatcaataattttaatcttaaaaataaatctctacagtaggcaatctgtggaaatcacttgtgctgatctataggtgcctcggtggaaaggaaatgctgattggtagggataataaattgtcttaatcctgcttgtgttcctgagagatgtgtctgctttgctctgcaagccttacagatgcccagcatgtggccattccaacctccctgccctgcacaggggctgcctgtgtcagagttgactcccctgtactactcagaatgcgaacctgcctgccctctctcagccactgcgctgtgcttctggctcaaggagcaggctggaagtaggtttgtgaagtgcaggctctggatcttcctgcccattcatgggtttagctaaaagacagagaaccttgggggaagtttggggaattattctcatctcctatttccaaagaggcttttgcgaatatgaaccctcccctggaagaagtactcagtcatctcaccctgcttcccccaagcatggaaatccatgctcctttgctgtcgtgctgactgggggcactcaaatgtacagcagattccttactgccgagaagctgtgagttatgggacattgtggttaaactgccacacgtccccaggatttatctcttctctgacatttatagaggaagtacagacacagtcaggcgtgtcgccttttagattttctgccagaacaattccacaggaattgcataaaaccagtgctgaacggcagtgggattaaagggaaccgccaaatgaatcccattctgtgcttttgtaattagtgtcaacgacacccatttaataaagataaaatgtggtataaagaagacagagagttggtcatttggcaagggtcagatggcaagttcgctgagttcatgggcaagttaaaaccacatagcctgcttctaaggagttaaacgtaagctgctaagggggaggctgggccttacctcattctccgtgtgcttgaacttatgtggaagaccacagtggacgctcctggtcttgtttggttggttctggtctccctctaccatccctcagctactctgatgaatcaaaggaagacactggctctctcctttcactgtttccacagcaagacacacacatgtggcaatgagtcatggtttgccttagagacaaggtaagagacctaaaatgcaaggcatgaaaagctcagcccctccatgtgtgctctttggttggtgatttagtccctcggagctctggggagtctgtttggttgatattgttggtcttcctatgggtttgcaaaccccttcagctcctccagtccttcccctaactcctccattggggaccccgtactcagaccgatggttggctgccaacatctatctctgtattggtcaggctctggcagaacctctcaggggacagctataccaggctcctgttagcaagggcttctctgtatgggtgggtgggtggaggagctccctcatagaagcaggagggagggaggatgtgtgtgcacgtgtgtgtttgtggagaggaaaccaggaacggggataacatttgaaatgtaaataaataaaatagccaataaagactaaaagaaaaaagaaaagcacagccccctttgaggacttccggaatgcagcagagggatgttagaagtctgctgtctaccagtccaacttttcttcagatttgctgacctaatgtttcccaaatagctgtacccactggtgaagtccagagttcattccgtctgactgacactgaatacattgttactagccatacaatccatttgttttcaaatgtgtcttctctataccaggcatacagtctccaagattattgtgtttggtgcccagtgttgaatcctgtgcgttgcaggaaagcatgtatttcataacggatcctcacctcagcacttctcagggcatgtgtgtgtgcgtgggcatgtgcatgtgtgtgtatgtgtgtacgtgtgtgtgcgtttctgtgagcatgtgtgtgtatgtgtgtacgtgtgtgtgcgtttctgtgtgcatgtgtgtgtttgcgcgagtgtgtgtgtgtgtgcacgcgtgcacacacatgaatgtggaggtcagaaaatagcttaaagctgtcataccttgaatgccatcaacctcggtattaggccagccagtgaccttgtctctgcctcctcagagatctgattacagtacctgagtatctgattaagtaccactgtgcccagtgctttcttgtggttctaggggatttgaactcagatccctgcttctgcttgccagggaaatgcttcggaagtatttccctagacacatacctgttcttactgtagacttacagccgtatctgcccagactgagcctccacttaaccgacagtacttgttcttttcctcaagataaataatacattatgcttcactgtgggtttttattaacttgcaaaatgcagtgcctttacatgtaaacaatgaaagctcaagtctcaattagaatagttgaagatcacagaaactggcgctgcaggcatttacagtcctgtcaaggccctgtgtttttggtgcatttgctggtgtgccagtgtgtgctgtcatgagccgcagtagaatatttgcatagtcctaggcatgaataacaccagccataaattacaccagaattccacacactggttcttcgagaatcttgcagatgcaaagatagaaggaattgtttaggttagagaggcattgcttgggaattcgacagtatttacaggaacaaaaggacatttatctatgtacattttatgagatttgaataattttctttagtgtctgtgctacttggcatgatttggtctcttagaggttcagctgtggagaaagaaagactctgcagtgtgttcaatactggtagctccaactcagaatatttccctctccctctctccctcctcctcttcccgaccctccttgccttcctccatctctctcctctctcctcccactcccatagcctcttctcccactaagcatcctcctccccactgccaggttgtccattgctgaaccagagggctagatcctgtcacaagaagccagcagacaccgcacagcctggaggtgtgtggagagaatggtagtagtggaaacaaacttccccaggaatctgctgagcaccttgctgtagcactcccctacacactgataaagtgtccacactgcacactgctagaggaatgcttctctttttccttctagcaagtcttacttgcattcacgtgcttgctttacagcaacaattcttccatagactttagccccgnnnnnnnnnnnnnnnnnnnnnncagttatactgtgtccttccttgtcttttcatggcagactctcacacacctggccaaactctacagaacctttcctttaatatttcaaagaatgtacaaagtcactgtgagcattggccatacccaaatgcccatcataagagatcattgatggccttcgataaatgcattgcaggccggcttccacaaccttcataaataccttgtccacccctgacacagccgctggtggaataccagactgggatcaatagaaaatcgacccaacccaaggagcaaattgttacgtggtttgttttactgaaccatcaaagaaacctctttgtaatgtcatacatcaacaaaattaagaatagcaggcactaaataaattcagtgtttgctttctatattcattatatttgtggcacagactgctggagattattctagcacagaattgaaacaaactgtcaggtgaaataaagatatgtaagtatgtttggtttaagcattaggatgcctctaaagcccatggcatagactagaaactagataattcttacaaaagagctgctgacctgtctgtcttcgtcacctcttcctctgtctgtctatcatctatgtttctttctgtatgtttatcgtcagtcttcttatcatcagctatctgtccatctgccagatcaacgtgtttacttatctgagcttcaaatggagggatacacggacctagaaaggccttcccacaccccagcactcagggaatcagtattccacactcatggcttacatgttgtgtgtgagaaatgaaggcagtaaattatgttgatggtgagagtgaaatgtcagggctttcctcagggggcaggccatgccctgcttagataaggagacctttgaaaaaaacaaaaagtgcatcttgtgttttgtatttctgtgttgctctcctcgtgtgacctgaatataataatgtgcatagtagcttatgtttatgattaccaaggaggtgacttcaggtgtaaaaatgttacagggataagaaatcacatgtgaaaaggaaaacagacctgcctatacatggcctatatatacatatagccacatcaatcaatcaagacagccatgcgtgtctatacatggtctctacatacatgtctatacagcctcaccctgaccatcctttccttgatgagaataagtgggtagccacacacttggataaggaacagtgatgtcactgagaacatgtgtgtgttagtatgcaaatcctagcgaacatgattacagaagtttatcaaaacatctaactcaaaggaaagaaaacacaactagataagacttgcagaactgttagcatgcaggcatagaacagtagttttttagactcttcaaggatggtaggtgtgacttggtgatccagcatgatgtctggtgtggtagaaggctcatcagacacttggagtgatcctagcatgaactgataggagtcttctgtattttgtaggagagttgattgaatccaaaagacccattatcttgttggaatttgaaaaaaactcaatgtgtgtgtgtagggtgtgtgtgtgtgtgtgtgtgtgtgtgtgtgtgtatgtagtgtgtgnnnnnnnnnnnnnnnnnnnnnnnnnnnnnnnnnnnnnnnnnnnnnnnnnnnnntgcacattttttgttgtttgtttgtttgtttgttttggtaaaggtgtctctctctgaacctacagtttttttggctagactgcatgaccagtgtttcccctgaacccacttgtctttatctgtcagttgtgaagttacagacatagatagccatgcctggtttttacggggcttttggggatctgaactcagatgcagcaagcgctttacccactaactatatcctcagtcccgtggtttcttataacaaattttatttcgctgatgttttatgtgcattggtgttttgcccgcatgtatgcaaatgtctacactgcagttagagagtactgagttaccatgtgggtgctgcagagtgaacctggctcctttggaagaacagccagtgcccttaaccactgagccatctctccaacctcctagttatgattgttttaatttctttcattatgggatattatgaacttgttttgtttaaagcaccatggttggttaaaacacacctctttgatgaatcttgctgtattagcgtttgagctatgtttttagagaatcaatagcgaagatcttgatcccatccctcctgccagaccagaagtgactcatcactctgaagtcagcagagcctcatctgcagttgcactttgccaagtaaatccataaatcatacggtccccataagatagcagctgccactgagcgtgctttcagtgtaaataaatacatcactcctacagatattctgcaaccgtttttgtctggtttgattgactgatgggttgattgatgtggctgcaatattttgtctcattttgatatgttactgtctttttgatatatcagcctgggtgtcagctgtaggttcagtgaggaagcattggagttgagatgttcactccgacccgtggaactagtgaggacagtcacaatcaggcctttgcaattatcagtccaacatggcttttagctctccccagcaacctcagaggacataagctgaaggggacaggaagggcccagggacacagctctgcccttgtcctaaggtcagtctcactgcctggccaccggggatgtcaccatgaaaaaaatcccacctgacctcatctctgtcctccagatgtgcacagctgctcctattgtctgggtatgttgtgccattggccctcagttcaccaaagatgcagggagacggtggcattcagtggccagaaactaccacattttaggtgtgagccagtttgttcaacttcggcttcttctcaaatccagtaaatctcagtgaatacagtcacggaactcctgaggtcgtgtccacgatttgataacttggtatggaaaactacaaaaagcaaaaccccttgtctttgctcttaccaaccatgctgagatgtacacctgggatatgcctttcattctttgcaagggagagtcagcttgctggggctcccaagaagtagagggctaaggttctgaacaggggtgctcccgactgtggacgcgtctaaaagtgttctccactggcaaacgcttagtttggtgatgctattcttgcgattgataagtgtgacttgagtcaggttgccgcctcctttgatgtttgcctggttggtgttattttcatggacactcacaactgcacatccagctctgttcttttcctgtttcctaataggtccgtgtctttctccatcatacagattttagaaattctttacatattctggataatgctgcttttcagtttcatgtgtgaacagcattttgcttgctctgtattcctagccagttgatcattaatgggtttcctagtggttatccactggttatctgttgcttatcagttggctaactactgttctcgttaaaaacaaaaaacagcttttgatattcctaataaaacagggtcctcaatttccctctgagctgcctgcttcatcatgtgactttccataggttctgcttacatctttgttcagctaaaaatattctctaattcctcttgggactttctctctggccaatgtacattttcccaatgttcagagatgtcctgttaactgttactgatttctggttggtctgtctgggtctgaggatgtaccttataatttcttcattcccttaaatgtttgagctttgtcctccctcccagggtatggcctgtattggtgaaacttatgggtgttctggaagaaggagtatgctctgctgtgactgaacagaacatcctgggaatagcagtcagatctagtcaccaatagagctcagctctgacttcttgctcattttctgtctgctattgaacaaaaagcacctagccccagttctgattgcagcaagtctacccagcctttgtttccttgactctgcctaccctgctgtcaggtctagttttggccatgtggggtcagcatgatatccctttccctttctctcaggatccttccttcttgtgaggtcctcttgtctggagctggccagctgctctatcactctttccatcctcgccttgaaggcggagctttttatcctgtgaattttctaaacaatctcaacaggttcccagtctatacaagtcacaccctcaaggtacagctaagagtgtgctagggattctgagggccaagaaaataccattccaactcttgcaactctcaccctcctgtaaaacacccatcccatgactcagaatacatcggcttctctgtctaacacagttgtgttgcccatggcattgttaggggtcttatttatttttctacaactgaacaatcttctgacaggccatccacacttcctatcatcactgatatggccggcctcaggagaatacattttgttgtgtgtttcctagtctgactgtttgttttactttgcctcattttgctggttccctacagtgacttcttttaggttatttgaaacgccctctaatgtccacatatatgatttatttatttataatatatggtatatataaataatattttcctgactagaaatacagagcaagcaaaatgttgtccacacatgaaagcaaaaagcagtattatccagaatgcataaagcatttctaaaatttgtatgatgaagagagacacagagttatcagaaaacaggaaaatgtaatatacaatataatatattactatatattatatattctcagggctgtaaaactttttatgtaatatatataattatatatgtaataattatatataatatattatattgtaatatatcatatatgatattacttttgctatatgatgtatggtatgtgatatatgatgtatgatatatgatgtatgatacatttttatatattctggtaccttaactacatatccttagaagtgcttttgtggttgcctgttgactgtagtagacatgtaccaaatttttgtctattagggccaatcatagtgcctcttcttcactccacaactgacccttacttcatagttggcccatgtccatctgcttgcatggaaactttctaggcaatattgctctcaaaagacgttgcctcagtttgttttctgtcataaatgcaccaccaccaaaaataactcggtgaggaaagggtttacttgtcttatgcatccatcacagtcgatcagcgatcgatcagcgaggaacggcagagcaggaaccgaagacagaaactgaagcagagcagaccttgggggaacagggtgctggctggcattccatggctcacttggtctggctagctccccatggctcactcagaccatggaggaacaggggtgccactgactggctggctccctgtggctcgctccgcccgttttctcatacaattcaggaccaccaaccagcccaggtgtggcccctctaacatcagtcccgagtcaaagaaatgacccacagtcttcgttcttcttgagtttcatgtgttttgcaaattgtatcttgtatcttgggtattctaggtttctgggctaatatccacttatcagtgagtacatatcatgtgagttcttttgtgattgggttacctcactcaggatgatgccctccaggtccaaccatttgcctaggaatttcataaattcattctttttaatagctgagtagtactccattgtgtagatgtaccacattttctgtatccattcctctgttgaggggcatctgggttcttcccagtttctttggctttagtgctccacacttttctccccctctgtaatttagacacttgtttgctttcctgactctgctggttttgctttttcttctgtgtgctttgcaatcctggagagggtgtctgtagctggttttccacgacctgaccctctttacgcatctacccgtggaagtttgttaatagactgagggtgattagcccttaccctcggggtctctgttttagtgttgttttgctcaagaaaaatctttttaatataaaaacattgaaaataatttctcttgtttattgcaaagatgatgttctcttttgctttttgcatgtaggaacctagctaacctctcctggccgtgaatgagtctagagtctggttggtggtgatatttctcatttctctgatcagaaaacagttgttctctgtgttttcagcctaaggccatggtggctctggcttatgaagctagaacattgccataaaatgtcctctatgcttgcagtgaccttccagaatcttccttgatgctatcatcctttacatggcccccttgagtgtccttccaaggaagcaggacagctgcttctgccacggtgtacttatcactctgttaggttaggctgatctctgttatgtaacttgcttctttataagtatgcacatgactgtgtgtatgtatatctgcatgtgtgtattgggaagggtgttttttgagggttatttctgtgcatgtatgtatacatgtatttgtgtgtgtgtgtgtgtgtgtgtgtgtgtgtgtgtgtgtgcatgcatgtatgtatgtatgcatgtatgcatatgcagcctggtgcagttccacttttagagactgcaccaagtgcattttaattactttatattgaaagctcacaccagcactcattaaatcgccaactcaatttaattgtcaaccagtggcagtcctagaagaattaaggcaaataaattgatataatattccatagctttattgaatagtttttattaaagcccatgtttaaaaaaatacagcaataaatttggtagataggatgctaacactctgttactagctctgaaaggggcggagtctgagagtcacatggcatgaaggtttcctggagattccatctcaggcccataaggaacaatatgtggtattttactactgatcataatcacataattatataacacatttatccatacacatgaaaaagcttaaagcacatgattgtatgtatgtgtgagtgtgtacatactattgtgtgtgtgagcatgtacattgcatatggcatacaattatttattcagaggttcattcattcattcacctattcaccagcaagtgtccacagaggctccactgtactggacactggcctggcctactgaatacctcagtcttcacagtgaatccccttcttccccatgagtcgagctccagcaggaacgcaaacattaggtagcaattaggtaaaacagataatctaccaaaagcagcatgaagaggaatgtggaacaaagctgggctagcagggggcagggcccattgtggaggggtacagttgaactgagtggaggctgagtcaggggacccaggaagttgcatcaagcacagactagctaggaggccaaggattttgatttctgctgctgaaggaaaaagtacccagaaaaggtagagccagcactgcagatacctggcagctggagagaagtaattgcctgctttacaataaagttggaattcccacagttataatgtaggtctaggctgagaaagagactaactgtaaaaatgtctgcaatgactgtagtgtgggttgactttcttcaaaaccattattctaggggctaggaagatggctcctgtagtgtacctgatacacaactgtgagtacctgggtcccagccctagaacacatataaaactatagtactggacacagacatgtatggatctctggcgctcactgcccagccagcctagcataatcaggaagtcctgagtatcaatgagagaccctgtctcaaaaaaaaaaatatgccttctaggaaatgacacctgaggttgacatatgatccccagaaactcatacttttatgtataaaaacttgcatgtataaacactcacatgcatatatgccccccacacatacaaataaaaccattaatccatgtttgggggcttatttgctaaggagtatataaaggggacagaaatggataagaggctagatagatgatcaatagatagatagatagatagatagatgacagacagacagacagacagacagacagacagacagacagatggtttgaataagcatgccccctctccatagtcttatatgtttgaatacttggtctccagttgctggaactgtttgggaaggattaaaaggtgtggccttgatgaaggaagtgtgtcatttgtggaaagcttacaagtttcaaaagctcaggccactccaactcagctctctctgcctctttgtctcctgattatgtctcacactgagacctctcagcttagattctatgttgttcttgtctgcctgctgccatgctccatgccattatagccacagaatcaccctctgaaaccgtaaaccccaactaaactctttcataagttaccttggtcagatgactcatcaagcaataggaaagtaactaagataggtcagataggtaggtagataggtaggaaggtagatgacagacagacagacagatagatagatagatagatagatagatagatagataagatacatgatagattagatgatagataaatgattgatagatagatggatggatagatgatagatagatagatagatagatagatagatagatagatagatagatagataggtagatagataagataggtagatagataagatagaaaagatatgagagagagagagagatggatagatggttaagaaatattcctgaccaaaatactcaggatcagagggtcttaccaagaaacatgtttttccttgtttctttacaaaactgcctaaaatatgcagctctctattgttcagaaatgcaaacagtccctgggatgaaggcttctatctcctgacctcagcagacctgggaggcctgcttgttccctgattatcatgattacattactctttgaagctgtcactttgtatttctgattctgccagaaacaggttgaaaataggagagctgtgatcatggaacatcgtgaagtcgatgataaaaaaatcccagagatgaaacccacgtggatttaaattaattttatatactagaaggtaatttttattacctagttttggaaagaaatcttgatttaaaagactctcacattttgcctactttggcaaaaccttgtctgttttccttcccctccgggaagcgttgtgtgcacaattggctttgcacttactctgtgttcaggactctgatggaccagagagccttccgggcgatgctgaaccctgctgcatttctctctttttacactctcagcaagacctcatttcccagttgttcagatacagtcactgagctctgacaacggaacaggagctccggagacggaagccacttttgtgacctttccactcactagtaaataagaaaagtacacagatccacaaagagctcacagacagtcatggagacccaataggccaccagaaacatccctcctctgtggcacacagaggtctctgcttattcactgtagtagatgggataagcgcaatgcactcccactcatcctttggccattagctctccattgctggcaaacattgttatttgtgtgctgtcctaactaagcctcgtccccataatccagcagttcttattctgtacatcagctcaagtcggagccgcctgtgtcttccagtgatactattgctaggatattgatcagtgagccccaccactgcatacacagtgctctacagatgtgaagactatacctattaaaactcccgttgggacttaatttgcaagcaatgacattagctccctaaaacaagatggcaccctgagaagaattttcccactttctaacccttcttggataggagtgctctgcttacccacaactctctagtcagaaacctcaaacagaaacggtgtttggagagtaagagaaactgtgtaaggaaggtactttcctgactataatgggctctggggccccaggagctgctagcctagcccctttgtcaatcaggggtgacagttgtattctccttgggttatgctgttgagtatccactttcataatatgcttttccctcattcttaattatatttatccctttagaacataactttctggaaagtaaatatttgagatgttaataaatagctgatcaggttatgcctcaaaaccgtcatgtgatgatgccagtgaatgcagcaggtgcggaagtagcttttggctcctgttgtctgtctgctgagaactgtgggcagggccctgctggtcttctgaggacagagggtggggcctgttggtctgctgaggacagtgggagaggcctgttggtctgctgaggacagtgggtggggccctgttggtcctggctggcctcacttgcttgggcctcaccttcctacatttgcattcctagttctgttgttttcccacagctgactcagaagggctagtccacagtgcacagtgcagaaggctttcccatggctgtcctttcctgttcaagttcatgttcaaggtgtgcacatgtgtaccactgcttaaccccttcctcccagatgatcttcccgtccttccaatctagcttaaatcttagagcccagtgtggtgttgccttgagaacacaagtctcttccatgtttcaacagtaatggcatggacaaattattggtgatttttttcagattttttttatttttaattgtgtgtacttgtgtgtgtgtgtgtgtgtgtgtgtgtgtgtgtgtgtgaagggaggtggctatgtgagaattggtgccctaggaacacagaggctttggatcttctggacctgaagctgtaggtggttgtgaacacctgatgcagttgctaggaagtaaactgggttctctgtaagggctgtatgcattctcaactgctgaacctctctctatccctgatacattattgatggatgctaaactgcctcgagatctctctgtgcgctgttgttgttgcatgaggtgcctggagggatacaggtcacgttaggtgcttcggattaagtcttacagaataagccacagttccttcaattttcacgtaaggacttaaatacatttgctaactgatggatgaagagggaaacctctcagaagatgacgtgactagagcagaccaactaatccctgtatatctgaatacacattctcacattacatatacagcccagtgactacagcatctaaagatgaatttctgtgtctcagaaaggtgctaataatatttaacctgtttctttcctgagcttgtgagtggttactagaatgataatatggacctaaaacatggatactattgcaaggaacagaaacaaaaccttacaggtgttcgtgtccgtatacctgaactgaaatatacagttgcagggcagtgggtgtgggggaaaggagtgggagaaaacccgcggcctgccagagttccggtgttctcagcaggcaggcagattcggaaggactgctgcaggctttccacatagccccgggtgggtgtctgtctgtgtgaagccatggaatcccagctcgcggggtgggggtcgggggagtggacaaggggcagtcctatataacaggttctcagtctccagcatcccacagtggataccacggaggagctgagaacaaatgggggccccatgggcagctcatcagccctggggctgaagaaaggagagggcagggggagagggggagctggatggttcccacacgggcaagaatccttggtctggtcaatggctggagcgcaggaaggccttccgggcgggaggctagatgtggatcgttaggggaaagcctatcccattggtcaagcatggcaggccttgatgagcagagacagtctatggttttagagctttattatagaaagtcagaggggaagagagaaagtagaaagagggagagaggccggccatggccacgtggagccaggggggagagagagaaggagggctagagatgagagtaagaaaggtgagagctaaaaagagtgaggaggggccaagcagccccttttatagtgggctgggctatcaggtaactgtggggaggagcatacctggatacagtcagggaactgtgggggtgaagtctagctagaagcttgggacattgcctgcgtgactgatagtgacagaattatggagttgggggctctgtggtgtcagtcacctgactctgggaatgtggctcacttggaaaagacagcaatgagcgcatccaaggctttcagtgcttcgggtggttctgcatgcaggtttggtgttttaggcaagggaaggcaggcagagatgctgactgttgtggacaagccatgaacataacttacgcttcgaggagaggtgcggattgaccgtctttagtcaggcctctcaatcatgccaagaaaatatgtgaaagggggttttaacatacttttacttttccgagtttccagtctataaggttcaagctttttcattagtttcccaggtccgagtcattgaacaataatggcattactataaatattcaccaggtctgtgtcagcaatcccaagtgtttcttttgtcactttctcttcttttgggtatgtgaggtgtgtgtgtgtgtgtgtgtgtgtgtgtgtgtgtgtatccatgctctcatgtgcaggtaaacatgaatgtgtagatatgtgtgcatgcgtatgcctttgtgtgatgactcttgaaggttcacagtaacaggggttgcccttggttgtttgcctccttattgatccagagtctctgagttgaacctagagctcaccagtctagctagccatcttgcctcacggatcccttgtctctgccttccaatggctgagtatacagggcactgtctacatctgcctaacttttgagtagggacaagcagtgtttgctgctgaaatctctcttcagtcttgagtttcgtcactttcaatggacataaagaaatattcaggcttttttatttctttttttgagtcataagttgatagcaggaaatcagcagcaaatccaaataaatgtcgattgaaatcccaacaggtattttttttctgcaatgctaattgttattagtaagaatagttcttgaatatttcagaaatcgcatcatccagatgtagaaggacagacttatccttaactaggcctagacacagctgtgcttggtgtcagtcaaagcttcctgtgcctttgggggaaacttcttaccctgtgtttaaacctgaggctatgaggacccaaatcccaccagtaagtggagtaaatgccactggacgaatgcacagcaacctgtcctgggttcggggtgaggtaggggagtcaactttgttcagtccaaaccacagatgacatttccacttttagatacatttggtgctgtgtttgtttctttttattttgttttgtttgttttttttttttaatgaaatagagatatacatatccccgtaaccacagactttccagtggaacatggtagctcatacgtggaagctgagctgcttgagaggctggggcgagaagatggtgttgaggccagcctgaggttcgcagcctttcctaatcagccgatggacaagcatgaaactctatctcaaacaccagcaagcaattaacacaaagtgctcccttggtcccaagtctcccctgctttaagccatatctttaagagtcacaaaaatgttccttgattatatagtctgattttcaaatatcattttcttactttctttcttcccatgtcttgttagcagtgagtggaaatgagatttgcatctgaaacactgatattcagtgttaggacagctagggctaccttctcttaatttccataaatgtcgcacatgcctcttttcacctttgggtaaatggtcgatagaaaaatcaattctgagataaatgaacagcaatatgacttcatgactgaattatttacaaagatgattttaatcctggagatgaaagaattgaggtaagaatctcgggaatcagttgctaataattagtgctgtccaaagaactgcaggtccatgagaagtctgggagagttaagcaatctaatcagctcaccttacgggaccctattaatagcatggcaggaagctgttgaaaatgagcaaatgcttgcagctgtgctaagcctacagccctcatgtatctctcgctccctctaggctcgtcattgcttttctaacctctgatgtaactgatgtgggtcagtgactaagtgtacttgctgctcttgcagaggccctgatttcagttcccagaacccacaagtcagctcacagccatctgcatctccagttacaggatatctgacgacctcttctggcctccttgggctcctgcatgaacacagtgcacataaacttatgcaatcacacacacacacatgaaattaaataaacatttaaaaagaaagaacatgcatgaactgaacctacatgtcactgtagcaagttctatcttcatttttaattgatatttcctagctgtggggcaacataagagaatctagtatctgagcaggggaagtagaaattatgtaactgtctcaattttgaacacgaagtcatccagactctgtgagaccacagggacactgtgacttttatccccagctgtgtgttccaggctgtaccattcttttctatggatcataggttctgtggagggatattcccgttacagaccttgtgagactaggattttgtttaaggaaaactagtctccaagctggaaagtgtcttgcacttcgattgtctacacatcagaggctgtgaaaacaacatctcagtgcagacagcttcatgtcctcctcatagaaactctccatgctagcagagcacagtattaagtgttactgtagatgaacctgggtcaatcaggtgatataatatcacaggaggatgctggaaacaaatgctggctcctggtggtctggtcatgatgcctcagccactggttgtgaaatgaaccttttagatctgatttcccaggtcccctgtgcactgtgacatgtgaacctctcccaactaaactagaagagctgtcaaagtcttcagttctttggaatattaagtctgaaaaaaaaaatcacaggatggttttttgttttgtttttgttttttgttgttgttgttgtttttggttttttgttttgtgtttgtttgtttgtttgtttgttttctttttcttttctttttttttttttttttgagacagggtttctctgtgtagccgtggctgtcctggaactcactctgtagaccaggctgtcctcaaactcagacatctgcctgcctctgcctcccaagtgctaggattaaaggtgtgcttcaccactgcctggcttcaagtatccttttttaaaatattatttattattatacagcatagctgtcttcagacacaccagaagagtgcatcagatcccataacagatggttgtgagccacagtgtggttgttgggaattgaactcaggacttctggaagagtagtcagtgctcttaaccgctgagtcatctctccagcctggttttcgatcgcccaccaaacaatttgatttgtgaagctgttcaagctaagagccttggtttggacctgtcttagaaagatgccattccctacccccacccctcattccatccccagataacactttcaggcatattataaactcatttaatccattgggtttaagtctctttattctttgccagcaagaggtctcccatgggcagtccctctccctccacaaccctgcccactggttattcaagcctgtccgggcatgacggaatgcattgcaaaccagggctgcaggaccacccacatccttgggattcccagcagcacggttttagtaagttcccagggcttcccgtatgtgaaaggacttatctgagtctgtgggctgtgagagtcaccacagggtaagatgtgttcaatggaaccaggcgaacctggcattgcttgaagctgtagacctctaaggtcttccacagagaaaatggcaagagatgaagtcaggatttcttgttgttgagttaaaaaaaaaatggacccaggagtgaattctattctgctaatgttcctctcttctcttgagcacagccagcattcgcacaccgatcacactgatgctctaagctcctatactgaatgccaaagggcagtgctgtctggtcaggcagcagcagacgcacactggacagattagcacttctccatcctgcacgagagagattgctcattctaagtgaaaaacatattctcctcaacccttaacacctgacaattatttttactggcgtgttaactacaagtatgcacacagtgctatgtgaactctctgtataatcttggctcataatgcagttgtgaccttaaaataaataaataaataaaagcctacagtaaattaagatccatgagactcaggtaaagattgcttctggcccagtgactgctgaaaccaggattgtataggagttggcagaagcacacgcagtttctatcagcttgatcttccctgccatggctacccatgacctccacagctgctttctatgtgtctgcagcgcagcctttgacctgacttatctctgcaccgtcactaggtttgctcagaggagaacgaagtgtatgggttccttccatctgtctataccacagcatccggcagacaactggtggtgatttttctctttctttcttttttgttttgtttttgttcacgtgtttatgtttttgattttttgagacaggttttcctctgcatagccctccctgcctgtcctgcagctagctctgtagctctagctgtagctgtagcagccagctctgtcgtctgtacaaccagactggcctcaaactcagagatctgtctatctctggttttccaagtgctgggattaaagatgtctgccaccaccatccagcaacaaactagaaaaatgacaagagtcacaaaaggatgtgttcaaatgaggcaaatttttcttaacgtgatgctttttaaaaaaaaaaatcacaaatttacaaatgtaagacattttaacataaggacttctaagcctccagtcactatttcagaaccactgtgtttaagagttgtccaagggggctggagagaaacctcagctcaacctttaagagtacttgctgcccttacagaggacccaggttcacttcccagcatccaactgaaaattcacaattgcctgtaactctagttccatgggattctgaccaggcaggcaccagatgtataggtgatgcacagacatacatgtagacaaaacactcacacacataaaagttgaaatgtttttgttaaaaagttgcttaagttgctcataacaatgtgcatatattgatgtgttagaatggcaggtcgcatctcaacagcacactagaccaagacagttctatgtggaagaggttttattgggagtgacaaggtggtggcagaaagagaagaggaggagagggggccggggttgttctccttatttatatagaaaatgatgtaacacaggtaaaggtgggaggtgagccaagtggattctgggaatatgctgcaggctgcactgtcacttatgtgatgtcataggtttaggaagtcctgatgctaacatatatggttacagtattgtatttgacacctgaaattaaaacatgagaactgctcaaagcctctttcctcagcatgtactgctctccttggttttaaatcacatctgtgaacaactacacctaaatcatttacactgacttcagcatggctcggcatctggggaacttttctttcataacaaaggggagactcagggccatgcctcggggtcactcactgagagaagctctttcatcgaatggtatttaatttgggcatcaggactccttcagcaattctaggggacgtcatcaagtcaacgtgaagcctccacagctactcctccttcatgcctgttctcacatgtcagtcacccacccctcgactggttcttactggttaaatgattgtgagctatattctatgaccaagatctagggccacattgaacatctagcccagtgctgctctccatagggcagaccttcaggcctagctcagctccagttccacatctaccatgtctttaaggtccctgtaaggagtgaagttcagggtcacagttatagtctgcgttatttcccttttcctgttgctcagctggtcatccccattcaacacacagaccctctgcaagccttctaccatggcaacctcaccaacacagatggttaaaagcagagtgataggaaaacagatctctcttgcctagctgctctgtctacactgtgggtatcacagaaaggcgtccatggaatctcctcaaatcaggccacgagctgtgtatagagcagaggaccgatccatgggctccaaaggtttaatggtgtctctgtctatgccttggtataacagttgcctcctgtctgtcaatgctaatgacagttctgtgcaaccttccaaagaggaagatgaagtagggtgacctctgtcttatagatgggtgaattccacctggtgtgaagccagcagaccctgagctgagatgtggcagggcccgtggcctcctgtgacttcttctttccctaaaatgaaataaatgtttccctttcagaagcaaaatgatcattttgttaccagaataagttttacctcttaatgataacatttggtttacttggaaatagcaaacgacaatcaaataattgatgtgttattgttaccaatacatcataagatcacaaaagaggacagacactggtgcaggtgtttctatgacaccatgtggtatttgaaatgcttcttgtttacactgtactggaccacaccagagtaacataatggtactggcttgttattcagagataccaaagccccttttatcacctctgagaccatcttacttgagttttgcaatctaataaatttaatagatctaaatgaagcaaattaaatgttattagccccatagtgttttccttttgggacaagcctctgaaaatcgtgatcttaaaacctctctgcgtcagatatagaatgtctaacttccatttagacatacctgtgcacgtgcttatttttttaatgaagaacaataatgctggtattctggcgtcccttttgtgcaagtccggcacttctccttttacgcctaataaatttcccttaatcagggctaatctctaaaatagaatctgaggaatgtgctgtggtattctccaaagaaagggtttattctgagctcaggctgattatcgaaaccatcagtcagagtttcacttattggggaaccacggaaagctctttgctggttgattccattcctctggacgcccttcagtattgcaagccttcgacaccctcattaagagggcttgctaatggtttgtgtgcataagcttcacattttataatgtacttgggaatttgactatttctagtaaatacagcaaagctctcaaaagagagaaaaggttttttttgtttttttttttttgttgttgttgttattgtttttttttgtttgtttttttgtttgtttgttttttgatcggggagtagtggtttttttagttttggttttccagaaagaaaagcaaggtggggagatcagtcagcaaagcatttactatgaaaacaacatgagctgagttcaagtgccagaacctacccaaaacaaaacaaaaacccaccaacaaacaaaaaaatcttgtacagacagcacctgcttgtaaaccctggttctggaaagatagacacacttgtatccatgcagctgcctagccttcttggggaagtccagatcagtgagatactctgccttgaaaaacaaacaagatggtatctgagaaacaatgcccaaggttcacacacacgcacacaggcacacacacacagaggaatgcacaggagaagacaccatgactcgagagatttgagatgttttctgtcaaattccctgccaagtctcactgagatcagcagcttcctagagacaggcacctctgtgctcaggtcagtgtgatgctgacttcaaagctgtgccttttggagtttaaatggagggccacatctggcatctttttagttgtcctagacaatgctgcagagtccatgctgcagtggaaatgtagaggggtgtttgtgtctgttgcagagagaaggagggcacagccagtggggagcccagtgccatctgcagagtggaggctggagttcctttgtctgggtttcgaatttactctttgttaggaacaggtctctgttacaggcttgtctcacctggctttcttcagttaaactgagtgtttgctatgcactttctcttgttttaattcctagcttaaacattgtttctgttcctttagtggtttggctagcgggtgggacacgcatgcttgactcattacattctagcatattttattacttctatcactttcctgatatttctagagctcaggctttaacctttccttaatccctccagcttgtgcagttacagttggcagccttgtgtgttttgtgtgagacttaccgtctaggggacgttccaagcatctaattgatgtttacctgcaggcttgctaattacagagttcctaaaccttaaattttacttttttttccccatctgagatcactctctccctatataaagggaaaccttccttttgagtctctgtctatgcacgatatctgaggacactttttgtttgtgcaccgtctttacttcactctgtgttttgaaggctagctctgtcagacagagagctggattggctctcagtaattccattcatgtttctttgctctcccagcctccagtattcctattaagaagtaagtgtctgctcctatcataggccctttggatatcagcacatcctttttttttttttcaatattttttaattaggtattttcttcatttacatttcaaatgctatcccaaaagtccccccattaaacccacacacacactcccctacccacccactcccacttcttggccctggtgttcccctgtactgaggcatataaagtttgcaagaccaaggggcctctcttcccaatgacattcttcctttagttttgtattcattctttgaaaatttcatacatggatacactgtatcttgatcatatccaaccctcattcttgtcttctaggtcctctgaggatccagaatctctatcatacctccctctaactgcatgtccttctaaatgtttgatttggtttggttgtttggatgtttggttggttggttagttggttggttggtttgagccatttagtccagttagtgctgctgagatgcagggaggagctgggatcatacacttgggctagtgcagaaactaccagtgtccacactcttgaagaaaagcacctctgcctaccccatgctgtatcctgaatgtgggaaaattcagaacacaggagactggcctcagtgggatctcacattagcagaggagagcagagggattttaaaatgtacccatgaagagtcacatggatgtcacacacttaccagaccctgactgtagcttaaataagtgcctggacagaagaagttgggtgataagctgaacaaagccatagctaagaacacagactctgaagccaccttctctgtgtgctgttgggcaaacaaacttttctgtgcctcggctgcctcatccacaaaataatagcaccgactttgtagaactcataggagaagcctggttcacagaaagttgcctgcacttgctagccctccacagcatctactagctggaaaattctatgtactccccagagccctgttttcttggttcatttcatagtggatagaagcagtctgaagaattttctcatgtgcagatcatcctggaaactagtaaagcactaaggagccatcccgctttggagaccctttctacggatgccttgagattgaggtagggatggaccagttgaccaggagtccagagatgtccacactgaggtgcggctgctctgacgacatattcccgtgtataggaaattctttttcctaatgaggacccccacgctgtactctgaattttgcaacttcggtgctttgaactaaaaacgttgaaagcgtcttgcatgactaaacagcccactcaggtgtgggttcagacgtggcccaggcctgctcataaggcttgtctgtctgggcaccattctctatgggagagccacaatacatgtcctacagagctctgctctcttgggtttaatcaaaagtcatgataggagccaggcgtggtggcgcatgcctttaatcccagcacttgggaggcagaggcaggcagatttctgagttcaaggccagcctggtctacaaagtgagttccaggacagccagggctatacagagaaaccctgtctcaaaaaacaaaacaaaacaaaacaaaatgtcattatagaatggaagtggtgctattttggaagccaggcatttgggacccaggagacaagagaaccgtcttctaggtttnnnnnnnnnnnnnnnnnnnnnnnnnnnnnnnnnnnnnnnnnnnnnnnnnnnnnnnnnnnnnnnnnnnnnnnnnnnnnnnnnnnnnnnnnnnnnnnnnnnnnnnnnnnnnnnnnnnnnnnnnnnnnnnnnnnnnnnnnnnnnnnnnnnnnnnnnnnnnnnnnnnnnnnnnnnnnnnnnnnnnnnnnnnnnnnnnnnnnnnnnnnnnnnnnnnnnnnnnnnnnnnnnnnnnnnnnnnnnnnnnnnnnnnnnnnnnnnnnnnnnnnnnnnnnnnnnnnnnnnnnnnnnnnnnnnnnnnnnnnnnnnnnncctcattcttcttaagaagcatcttctctttttaaaaaataatgttagaatagccagaaaatggtgcctgtaatagagttccagctgctggcaaaaacgaagtgggggtggggttacccctcacaaggcaacctttctccccattgtgcccaggctgaaataaactgggcagcccaaggatcagtttccaggaactattggaaacgaagtagaaacagctaatatacttcatgccaggtgctgtccagcaagagctgggcctgggcctgtgtttgaaggtttaccatctgagaaagtgcccagcacctagacaaatgtctctgctccattgtcctcacgtgggtagtgtggctagacaccgtagcaggtggcaagtgtgttctcagacacggctaaccttccctccagtaagcagcatgttagtggttgtctcttattacctctgtgcttgggaactgttttgatatcagtatggcccagttctagcaactgttccggggggtggggtgggtctgtccttgggctaaagcgtatgactgaagtgggggctatgtcattctgatattcctgctgaatgtgtgtgttaatgaataagcattcctgccctggggtaaagcttaagaagtcttgtttttctaaaggcaaatctattcagagaggaattaaatgaagagaaaatacaagctggcacaggagtgtttgtaaactcaggaaatgtggcaggttgatgctgctttctcttgtcctgccgggagatgtgatacttgctaatgacctcttgatgatgaagtcaacatctgcaggaggtcgtttcttactccctggatccatattgtttccagtggtcctgcagctggaggtttggaaggccaccgactctttgcaccccagccctgcccttccccctgccattgctgccatattcccctgctcaacttagtcactgtaggtaccttgattcttctgttccactgcaggttatccatcagctgaggctctctgagaatgaaagcgtagctctgcaggagctgctggactggaggaggaagctctgtgaggccagagaaggctggcaggaagccctgcagcacccggagccccgtgcacctccgccgccaccctgcaagaagccgacactcctaaagaagcctgaggggggctcctgcaccaggctgccttcccaactctgggacagcagtatgtga

SEQ ID NO: 199 - DNA, 5967 bp, Mus musculus
gcggggcgcggcggggaggcgggagggcgccaggaccaggcgaccgccctgttcttgcgtggagacccaaaggaaccaggaggaccagaagggacggaacccagctgtggactgtgtagggagaggggcggagctcggaccgagtggcagggacgcggctgcggcccgaggggcgggggctgcgagctgccaacgggtggagtcggggtccccatcgcgtctcagcgcagcacatctccgccagtctgctccgtgacccggcgtccaggagcagagcagaaccgccgggaccgtccgttgttggatcccggggcaccggggatcgttcttcgtcaggttgctaccagctatgtaatgtttttcgatctcatgagatggaaattgaccagtgcttgctggagtccctccccctgggccagcggcagcgtctggtgaagcgcatgcgctgtgagcaaatcaaagcttactatgagcgagagaaagtgttccagaagcaggaagggcccctgaagagaagcaagcctgggaagaggcagaaggttcgcttcggcctggctgacatgattcaggatgctgtcatccaccatcatgacaaagaggtgcttcaactcttgaaggagggggcagatccacacactctcgtgtcctcaggagggtctttgctacacctgtgtgctagatacgacaacgtcttcattgcagaagtcctcattgacaggggcgtcaatgtcaaccatcaggatgaggacttttggaccccaatgcacattgcctgtgcctgtgacaaccctgacattgtcctgttgctcatattagctggagccaacgtctttctgcaagatgtgaatggaaacatccctttagattatgccgttgaggggacagaatctagtgctatcctgctggcctatctggatgagaaaggggtggacctcagctcgctgcgccagataaagctgcagcgacccctgagtatgctaacggacgtcaggcacttcctgtcttcaggcggagatgtcaacgagaaaaatgatgatggagtgaccctgctgcacatggcgtgtgccagtgggtataaagaggtggtattgcttctcctggaacacggtggagacctcaatgggacagacgacaggtactggacacccctgcacttagcagccaagtatggccagacaaccctggtgaagctccttctggcacatcaggcaaacccccaccttgtgaactgcaatggggagaaaccatcagacatcgctgcctccgagtcgatcgaggagatgttgctgaaagccgaaatcgcctgggaagagaaaatgaaagagtctccgtcagcccccagcttagcacaggaagagctgtacgagatccttcatgacctcccagatctctccagtaagctaagtcccctggtgctaccaatcgccaagcaggacagcttactggaaaaagacattatgttcaaagacacaacgaaaggtctgtgcaagcaggagtcccaggatggccctcctgagaccagcatgacaagcaactgcggcaagccagagcaggtccaggtcatgcctccagctcccagcgatgacctagccacactcagtgagcttaatgacagcagcctgctgtatgaaattcagaagcgctttggaaatgaccagatacacgtgtcccagatgtatctgagccccacaggccagcgcagcccctcactgccaccccacctcttctcctgcgcagagagagccttccacagactgttccaggagcgaaagccacagaacatcatcctcagtggagaacgagggtcagggaagacccaggccagcaagcagatcatgaagtacctgaccagcagggccagctccagctgtaccatgtttgactccagactcaggcatgccatatacatcgtggaggccttcggacatgccaagaccacactcaacaatgtgtccagttgcctcatacagtactgggaactgcagtgctgtcagaggagaaagcacataactggagccagaatttccacttacatgctggagaagtccagggttgtggctcagcctcccggccagggcacctttctgattttctcctggttgatggacgggttatcttcggaagaaaaatgtggacttcaccttaataacttctgtgcacaccggtatgtgagccaaggcatgcgggaagatgtgtctacagcagagcattctctgaacaaggagagacttgcagctctgaaacatgctctgaatgtaattggcttcagcaccttgctgtgtttgatttcagtggcaggtatgttgcaagtgtcgaccgacgagctggcatccgccctaacaactgatattcagtattttaaaggagatgtgataatacgtcgacacactatccagatggctgcgttttaccgcgacctcctggccaagtcactgtacagtcgtttgtttggctttctgataaacactgtgaattgctgcctccagaatcaagatgaatataaaagcctacagacattggatattggaatactggacatttttggttttgaggaatttcaaaagaatgaatttgaacaactctgtgtcaacctgaccaacgaaaagatgcaccactatatccaagaggtgcttttcctacaagagcaaacagagtgtgtacaagagggagttgccatggaaactgcctgttctcctggtaaccaggctggagttttggatttcttcttccagaaaccatcaggattcttctccttactggatgaggagagtcaagtgatttggtcaggggagccaaacctccccagaaagctgcagggtctcctggaatcctcaaacacaaatgcagtctactcccctgtgaaggacggcaatggaaatgttgctttcaaaggtcaaggtgcggccttcactgtcatgcactacgcaggaagggtcatgtatgaaatgggaggagcagttgaaagaaacaaagactctctttcacagaacctcttatttgtaatgaaaacaagtgaaaatgtcgtgatcagtcatttgttccagtcaaagctgtcacaaacaggatcgctcatatcttcctacccatcctttaaatttggaggacacaaatccaccctgcttagcaagagaaccgcctcttccatggttggagtaaataagaattacctggaacttagcaagttattaaaaaagaagggaacttccacattcctacaaagactggaacgaggagagcctgccaccgctgcatcacaactcacgaaatctctggcagacattactgcgaagctgcaaaggggcagcccacacttcatcctttgcatcaagcccaatacctcgcagctgcctggtgtgtttgatcacttctacgtgtctgcccaactgcagtacctcggtgtcctggggctggtgaggctattccgctctgggtatccagtgcgcccttccttcgaggacttcctgtccagatacgagccactggcttctgttcttctgggcgagacgaagggtcaggctgctgaggagaggtgtcgacttgttctccagcggtgtaaactgcaaggttggcagattggagtacacaaagtgttcctgaagtactggcacgtggaccagctcagcgacctgtggctccagctgcaaaggaagattgtaacttgccagaaagttataagaggatttctggcacgccagcacttacttcagagaatgagcatcaagcaacaagaggttacatccatcaagagcttcttacagagcacagaggacatggcactgaaaacctatgatgccctggtcattcagaacgcttccgatatcgcccgggaacacgacaggctccggaaggaggtccacactgcctaccacaggaacagacaagaggaaggaaccaagagagctgaagaccaaggaggatgcaggcacgtccactccaactccgtgccggtgcccatggtagtagacagcctcgcccaggctctcaccggaccatctacccggcccccatcattgcactctgtgttcagcatggatgacagcactggcctcccatcaccacggaaacagcctccacccaagccaaagagggaccccaacacccgggctgagtgcctcctatgaggctgtgagcgcctgcctttcagctgccaaggatgcagccggtgaagctctgacacggcccagaccccacagtgatgactatagcaccatgaagaagattccccctcggaagccaaagagaagtccccacacgaagctcagtggctcttatgaggagatctggggaccaccacgaccttctggcaccatgggccaggggggcaggcatcaggccccagggacactgagtgtgcagtgggccaggcctgactcagtgccgcagtgcacaccacagctgcctctgcacctgccattgccacagggcgactatgacgatgatgctgagcctgtgtacatcgagatggtggggaatgcagccagggcaggtggatctgagaccgacagccctgaccagggcgagtctgtgtatgaggagatgaagtacatcttgccagaggagggctgtggcctagggatgctcaccttcctgcctgcctcacctcctttgtttttagagactcgaaaagccatcatcttggaggctgctgaggggaactgccagccctcaaaggatacatgtgacatccccccacccttccccaatctgcttccccacaggccaccactcctagtctttccccccaccccagtgacccgctccccagcttctgacgagtctccactgacacccttggaggtgaagaaactgccagtcttagagaccaacctcaagtacccggtgcagtctgaaggctccagtcccttgtcaccacagtactcaaaagcacagaagggagataatgaccagctggcatcccctggctttcctgtgtttaatgggcccagccgaatctcaccacctgccacaccaccgccacccccagggccacctcctgcaccctgtgggccacctcctgcaccctgtgggccacctcctgcaccctgtggaccacctcctgcaccctgtggaccacctcctgcaccctgtggaccacctcctgcaccctgtggagcggcctctgcatcctgtggggtggcccctgcaccctgcaggccacccacccacttcgccttcccaccagagtctgtcctggtcactgcagctaaagcgctgactaactcagacctgcccagaacacagccaaagcccagttcggccccagtaccgggtccctgcagctcctttgtcaaggctccatattcaccgggaaagacagccagagcagacctcaggaagacctcatccaccttctctccaccaagcccttacagcccacccaacagcagaccgctgtccagtcctctggacgagctggccagcctcttcaactcgggaaggagtgtgctacgcaggtctgcagtgggacgaaggatcagggaggctgaaggttttgaaactaacatgaacctgagtagccgggatgaacccagttcatcagaaatggcttcagagactcaagacagaaacgccaacaaccatgggactcaactctccagttccctgtctagcgatgtgacggctgaaaatggaaatcctgtcaccaatggtttagctgaggacgatgggtgctcaaggctgtgtctgagtggcatggggacttcatcatttcagagaaatcgggagagccacaccacccaggttatccatcagctgaggctctctgagaatgaaagcgtagctctgcaggagctgctggactggaggaggaagctctgtgaggccagagaaggctggcaggaagccctgcagcacccggagccccgtgcacctccgccgccaccctgcaagaagccgacactcctaaagaagcctgaggggggctcctgcaccaggctgccttcccaactctgggacagcagtatgtga

SEQ ID NO: 200 - protein, 1242 aa, Mus musculus
MEIDQCLLESLPLGQRQRLVKRMRCEQIKAYYEREKVFQKQEGPLKRSKPGKRQKVRFGLADMIQDAVIHHHDKEVLQLLKEGADPHTLVSSGGSLLHLCARYDNVFIAEVLIDRGVNVNHQDEDFWTPMHIACACDNPDIVLLLILAGANVFLQDVNGNIPLDYAVEGTESSAILLAYLDEKGVDLSSLRQIKLQRPLSMLTDVRHFLSSGGDVNEKNDDGVTLLHMACASGYKEVVLLLLEHGGDLNGTDDRYWTPLHLAAKYGQTTLVKLLLAHQANPHLVNCNGEKPSDIAASESIEEMLLKAEIAWEEKMKESPSAPSLAQEELYEILHDLPDLSSKLSPLVLPIAKQDSLLEKDIMFKDTTKGLCKQESQDGPPETSMTSNCGKPEQVQVMPPAPSDDLATLSELNDSSLLYEIQKRFGNDQIHVSQMYLSPTGQRSPSLPPHLFSCAERAFHRLFQERKPQNIILSGERGSGKTQASKQIMKYLTSRASSSCTMFDSRLRHAIYIVEAFGHAKTTLNNVSSCLIQYWELQCCQRRKHITGARISTYMLEKSRVVAQPPGQGTFLIFSWLMDGLSSEEKCGLHLNNFCAHRYVSQGMREDVSTAEHSLNKERLAALKHALNVIGFSTLLCLISVAGMLQVSTDELASALTTDIQYFKGDVIIRRHTIQMAAFYRDLLAKSKRLFGFLINTVNCCLQNQDEYKSLQTLDIGILDIFGFEEFQKNEFEQLCVNLTNEKMHHYIQEVLFLQEQTECVQEGVAMACSPGNQAGVLDFFFQKPSGFFSLLDEESQVIWSGEPNLPRKLQGLLESSNTNAVYSPVKDGNGNVAFKGQGAAFTVMHYAGRVMYEMGGAVERNKDSLSQNLLFVMKTSENVVISHLFQSKLSQTGSLISSYPSFKFGGHKSTLLSKRTASSMVGVNKNYLELSKLLKKKGTSTFLQRLERGEPATAASQLTKSLADITAKLQRGSPHFILCIKPNTSQLPGVFDHFYVSAQLQYLGVLGLVRLFRSGYPVRPSFEDFLSRYEPLASVLLGETKGQAAEERCRLVLQRCKLQGWQIGVHKVFLKYWHVDQLSDLWLQLQRKIVTCQKVIRGFLARQHLLQRMSIKQQEVTSIKSFLQSTEDMALKTYDALVIQNASDIAREHDRLRKEVHTAYHRNRQEEGTKRAEDQGGCRHVHSNSVPVPMVVDSLAQALTGPSWPSLHSVFSMDDSTGLPSPRKQPPPKPKRDPNTRAECLL

SEQ ID NO: 201 - DNA, 219012 bp, Homo sapiens
cctatggcttctatgtacatgctagttggggctttctcgcagtttgttggatgatttttctagagtggcttccccaaaggagaaacacatgcggaagctggatgctttttttgataacctagcttcagaggtcacatagtattacttcctctgtaggttggagcaatcacaagcatgcccaggttcagagaggtgggtaaattgagtctacctcttgatggtgaaggaccagttttaattggacatcatgggaaaaggactggggatgtttaaatgggtaatggttgctatattagtctaagtatgggacaggatccatgtaatttcactcacactgtatcatgtgatagctattagatatcaatattgatttgtctgctgatcaattgatacacaaatatgataaaatattattttcagttgtttcacacatagatttcaaaatcatacatgtgttaaatatctacctctatcttaaagcatcttctaccctgtgtatctccttttcacaatgatgttgaactttccaaaatcatttcagggacttaccagctgttgatctgatatttttaaaaatttgaacaaggaaatgcatttattttcgctacgtgtcagaactctagcataatgctattcaggtttctacagaaaaacaaatagaatcattaaataatgagatgctagtataatatacctcttacaatcatattggattctgtgtttatagatagcatgattattggtcttctttaaataacagtcttcaaaaacctgttttggggaaataaaatggggagtggcaacataattaagaattttgagcatataaactatacatttaatgacttttccctcaaaatctctgtaagttaagtaatatcacctctgagcttaaataatttaagtagctcatagaagttcacacaaaaccaaggtctgaattcaggtttaataacaagctattttcagttccaaaggttcttagaaagctaaacataaaattttattagtatatattttctaaacttcacttgatgccccttttgtttgtatttctcttaggactcaatattatttattctattatgtttagaaacaataaactcttcgtaaattttatgtgccattgttttttccatagtggaatttatcaccaaatccgtttaatataaataagtttcataatggaggtgtatctttttcattgtagagtaccaggatgattaaaaggaaatgttacaaagcttagtaaggagaattaatgcatttgaaaccatctatcagattactttagagaagagtgaattgagtaattttaatgaccaggaaaaggcttaagttaatcattgtggctgtccagctataaagctccaatcccagatacgtaaactaggaaaatgctttcatgtagttttgtgctaataattgataatggctacaatttcttgagctcctactattagtcagattatttttctatataatttttaactcttacaacagctttttcagaaaattaagagttaaagtccccacaagttttatgaggcccagtgggaattcagaggcagatgtgtgaggccgcaggagctgctccagcacaggccatgctgtcagtttgtcagaacctctaaactttgcatttcattctgaatcattacaactatttgaaaaaggcttattattttggtagaaattatacattaatcattggttttggactatatgaataattttatatgaaaaaagaaagcatattgattagaagtttattactaaacaagaaaacaaacttttttttgaaaaatattgaacaatttgatagagtgactgaagctctaaaataagagcattttaaccagaggttatgtttctaactcttgggcatggcttctatttaaattgaggaatatattttatgtacaaggtatcatacaaaatactaaaaataatttttttaatatgtgtttttcaatcctgatcttagcatattattatataagatttgtcaataaatttagccagttagtttgtagtcgatagactcctttttgaagaccaattcttcaaatcccaaagtagtaattatttacattaaaggagaatatagtcatgaattaaacccatcaaaatactagatttttttgttctgagtaacagaataaaataaaagttgtaaaaagagaaagtgtttttcatttgtgtaaaacaatgtctttatacatgtgaagtagctgaaatttatatttacttaaaatttgttatatatactttaattttaaaatatctaaggaagccagagaaggaaagatgattgattcctttaagaaatagtaacagaataaaaaatttaaaaaaaaaaaaagaaaaggaagagaaggggattgggaaatagaagggtgaaaaaagaaatacaaacaaaaacaaatacggcagcctgggccaggtggtagctgtgggtggtagcgaatgtgtgcccagtccacttcctgggtgctgactgcgggtcccaatgtggggctctggtaaggaaagcaacccttctctgctgtggctaccaagcacccaagtcctctatttttaaaataagattagcttatcggcagaggtagtatcctctatcaaggtaagagtcagtcatggtgctagcaaaagagtaaacatgacctttcccaaacaagaatggtaggaaagaaaggcctctacaattatagattctgagaagacaaaataaactagacttttaaaactgaagtaaacaagagagatgctatcccctcaccaacctcctgtacctgccgtttcataggcaatatatggaaatcagggataactgatttgtcggagaaccacttggagcagtctggtgagccccaaggtaatcttcaaatagttgaagtttatagtatgcttgaagtgttcaagtcccaaagaagtcctgcagagaagcctaacttaactccatatttccccaatgggcttctgcttacgtagggtttttagacaacagctattaaagtctcacacaattagtgttctgctgaacatatttcagcaatgctcagtgtctaaaatctaacactattccttctctctctctctctgtgtgtctgtctcatgtgaacacacacacattaatatcttatatatacacatatatattaactaatgagcaaattagttgatgcatagtgcattctcagttctatgatctatctcagtgtgttcaaccatgtctacccattagaatcacctggaaagctttttaaatatttcaatgcctgcaccccactccaatttaattggtttggggtcaggcccagacattagcctttcttaaaaaactcctcaattaattccaatgtgcagataggcttgagagtcactgcccagggctctgccttcagctggagtcagctttaattaatctcctactttaattctgtgatgtgtatgccatgctctattatatttttgtttcagatatgtttcactgagtaatgaaagtaaagggagagcagttggtggaaatttactcaagaaattgtttgtcattaatacaaatgatgagccatctggataagcaataagtttccgttcctaaagagtgtgttccaggggtgcatagtttttattagtaaaccacttagcagtggcacttcatgtacaaagctgtattttaattagagaagagcaaatactatctaagcagctacttgataattattcatgagcatttatgaatactcacctttcacccacattcacgtctactctgaggaatacccggagatctaattgaaccccaaaacaactctacagtaggtagatttgaaaaagtaatggttgttttccattgaagccaatgatgccaatgattgatgcagatttatgcttctaggtatacgaactaatttgcctgtaaaaatcttcactctatctttctctgattgtgttgaacacacgcccacatatgcacattcacatacacatacagagtttagtgaaaataaatcaagaataaggttctgtccatgactttggcaaaaccatttggtttgtggggtacatttttttaaagtttcaatgaggtatccgatattgaatgatatgttcctattgttaaccttagctacatgttctagtggttttgaatttcatgccacagtacgtctatattttaactttggttcaaacaatgagtgctttgaacagtttagaataaaggcaaactttaagtaaaacattttaatggacacattacaccaaaattattttgaaaaaaaacattctactttaaactacatatgtttccagtgactcactaccactccacatcactctccactgttggaaacacaaatatagatttagttccagaaggcaccttcataataaaaggtacaaattggaaatcagtccacaggctacttggttttacacatgaagctggaaatttctctacgggattttaataatttactttaaaattttttcccccagaacacaaagaacatgatgttcaataaaaggttcaggtgtattgcaaagatcaccctatgccacaaaaagaactcgccactgacgctgcagcttaataatgctagaagtccagcagagacgctgtaggttttatcaatcattttgattgaccaagagaggaataaattgggttgctctatccagagacacaggccacatccatttctgttatccaaagtttggtagattgctttagacgtttgtggaaaaaaggaagaaagctgagacctggcttcttcccgtccttgtgtttgccacggtttcatctacattcatacttggtttcactgctttgattaaaccaggggatcaattcagtgaagccaatattcaattcagtaaaatattagtacgaaaaaaacaattacagtatctgttttctattatcagaagcctcaggtcagtcaaaacaagacagaggttgtgttctgtaaggcagtcaaggccaggaggatgcaatcagattgtgatcgaaagcagtttttgtacctacagagctgcaacctattctgaatgcaaaataacaaaagaattgtattagatatgttagagtcatcaatgtccaagtattttcaattagagaagctcaaaaggagaggaaaagaaaatgtcatataatgtgggtatgtcttgtaaataatcagccactgagtttttaaaatttggaatcctgtttatcgaacttcttatcatttcgcacagtaatagacattaccttatttcatggattcaacattgtttctcagcaatttgttccctaaaatgtattccacttaaccacactatccataaacagttttaagtcaaattgttgcagtaaatgacctatttgtgttaatttttaaatgattcaatgtatttttaataataaaaaacttgagaagttacagttgtatatatcatatagtcaaagaagatattttccagtggtttcattccataagagaagtcattagtttctgtacattttcagtaaatatttcaccccaaactttaataattgtatagcatttattattcctttataacaaaattaccttattattggagtttaacaaattattaaaggaatgcatcaaaatattatttctgaagcaaagtgaaatagtttaaacagtttttatttctttttaacaatttttattttttatttatgattgaaatgaaagtgacaagtagatgtactgcttgaacagtagggatgccattgtggacagatgctacatagttgcatggaaagtagtttttctttccaaaaccattactggagatttatgccctgtaggataagataaacatagaaactgatcatgaagatctggattgcctggcatcacttggttttgatggaataattcaagaggataaatgtgctagactgtatcagttacaagaaagaaaatatttttcatatgatatttagatactgaatgccactcctccctctgccagctataatgtgcagaatttgttggtctgtgtccatattcaaatcgtatttgccttaacaacaacgcctttaaaattaaatgttttatatggtatgttctcatccgaagcaactgttttaattaagagatgatcacagcagtgtgagtttacctaagaaacacttaaaggtttaaaaggtaaagaacttccagctttgtgcatttctcttgaaatctagttgtcagaagacagagaggaaaagttctagttacttactgtgcaaataatgtacaaggaagaaaatccagtaaccacagagggaatgctgggggaagaagacgataccaggagagtctcctggtttatacaaatcctctcaagttctttaggtttaaaatgacttctatgacaaccacaacatggcaagttcttctttaatttttaatttagatttcatgttgtaatagaatgttttagggaaacttcttctatctacagaaattaatttatcactgaatttaagaaaccatcttttaccatgaaggcagagagacaagaaaacccattgggaagggtggtagtcatggagcaccattttttgacctgaatctaagaattatttttgttactatttgaatgtcaatatgtgatattcagatcttattttaatatggttattactttaatattttgtttggtatatgtctactatactgttattctccacctgtcatattaataataataaagaccatgtgcattcatcattaaaataactccatcaggttgtaagaacctctgcactttgagctctcctacctctgcttcagtcaaggacccccttgcctgccaccctctcatgctctaatcaccccgtttctgaagatgtttgagctagctacacctacgcacaacattctaaccctggcaagaagactagaactttacagcaagtccacccagtcccacgccacactcccttctgtgttcacaccaatgttctgctctttcatatgtttgtttcttctctgaagaaatttccccctgagacttcttcatgccctacaatgtcataaatttccattctcccaagtaactggatttttgagaaaatgtccttttccatctaggtgcatgtaattctcaagtcattactagccacacccttaagggtaagtgggagctccctttgggaggatatggagtgacctcgtgctggtcacttgagaaggtaatttgtcttgctcattggaagctgtccttatatgggctagaaggaggacatgaatgcccattagcaggaccagaacatctagaaggagctcctacttcccaggtgttgtgatgacatcagacttggagaagatttgggatatgtggaaaagaggaacccaggaagttctttcttttctgggctcttctttccagtctttcttatttattttatttatttatttgagacggagtcttgctctgtcacccaggctggaatgcagtggcgtgatctcagctaactgcaaccttcgcctcccaggttcaagcgattctcctgtctcagcctcctgagtagctaggactataggcacccaccaccacaccaggataatttttgtatttttagtatagacgggatttcaccatattggtcagactggtctcgaactcctgacctcaggtgatccacccacctcagcctcccaaagtgctggggttacaggtgtgagccactgcacctggctaatattttgttattttttaacaaaagctttcgcatttctttatattaatacaggatatttctcattaaatattatcttagatattattccccttgcagatgagatctaattttctttcaaatgttttatcaattgtttccagctatataaatattgatctgtaattatttttagttactgagcagtaaatatttctaaccggctttaagttttgtctagtataacatagtggtttagggtgcagatgagggaacataaaggtctgtaaaactgagtaagctcacaaaagaagtgggtataggcagagaagagacaaggtccacaggcagagcccctggacactccaatatgagcaggccaggagtccacgaagagtcgggaaaggagatggggaggaagcagccagtgagctagaaagccaagagagtgtggtgtcccggaggagaggggagaaagtgctccatggaagaagagaaaccgactcagtcaaataacgctggggtggggatgggtcaagagaaacaaatgtgagagttgaacattggatttagaaatgtgcacactgctagccaggggcggtggctcatgcctgtaatcccagcactttgggaggccaaggcgggtggatcacgaggtcaggagatctagaccaacctgtctaacatggtgaaaccccatctctactaaaaatacaaaaaattagctgggtgaggtggcgggcgcctgtagtcccagctactcgggaggctgaggcaggataatggtgtgaacccgtgaggcggagcttgcagtgagccgagatggcgccactgcactccagcctgggcgacagggcgagactccgtctcaaaaaaaaagaaaaaaaaaaaagaaatgtgcacattgctgatgacttctacaaaagcaagtttgatggcgccatggtgtcaaaagttttattagagtggtttcaagagggaatggaaagataagaatttgagataataagtagaaatcagccgtgtgtgtgtgtgtgtgtgtgtgtgtgtgtgtgtgtgtgtgtgttgataggaaaggaagcacagaagtagaagagtagcctagaggggaagtcggattttgcgctggttagatttgagttatggtatagttttttaaatactttaagataaataaaggtttttttttaagattaagaaataacatatttgtttcctgatgggaatgtcttgtggaaagagaaaaattgacagttggaggaatgtggaaaattttctgataaagaaaataatttcttcaatataatgatttgactgttgattactatttctgaaagaacccccacattcattcttgcccatcactaatacgcaatcagaaatgaggccctcatgaaatgcttctcttttctctgggatctcatggtaaacccagctttatcttcatttcctgatgagagctcaaatatattttccttttggaaatattttaaatgctcaaatatatttgagactcaacgtttgtaatattggaatcatacttttcgttgtttttagcatactttgaatagttagatgatatggtatcagatatacttgatctgtgaaatatgtgcaagtccattcctagacttcagttgaaactctgacttcccaggcaacgttgtcatgctttattttggtagactaattggttggaaactccctgagtcaatactttcccaatctgaaactgtgtcattgaacaactgaatatgcactgctgtactatcttgtgtatgcactactgtactatatcttgtgtatgcactactgtactatcttgtgtatgcactactgtactatctatcttgtgtatgcactactgtactatcttgtgtatgcactactgtactatctatcttgtgtatgcactactgtactatcttgtgtatgcactactgtactatcttgtgtatgcactactgtactatctatcttgtgtatgcactactgtactatctatcttgtgtatgcactactgtactatcttgtgtatgcactactgtactgtctatcttgtgtatgcactactgtactatctatcttgtgtatgcactactgtactatcttgtgtatgcactactgtactatctatcttgtgtatgcactactgtactatcttgtgtatgcactactgtactatctatcttgtgtatgcactactgtactatctggtgaaatgttttcttgttttctccacaacagctttgtgtcaacatgaccaatgagaagatgcaccactatatcaatgaagtgctttttctccacgagcaagtggaatgtgtacaagagggagttaccatggaaacagcatattctcctggtaaccagaatggagttttggacttttttttccaggtattcatataatataattagatacttaacaggatatatgggtttaaatatactggagacaaagaattttctttcaggacgccttatttttgagatatctttatatgtgagattctgcaataatttttcaaaatgtattgaggtgcacaagttatctttttatgaaaggacatttgaaggatcaccaattcattaaaaggacaagaaaatatcattttgatatagaaatattcaacactgtttattcaacatcactaaaactctccttttggcaattataagtgcctattgtaaaaaaacagactttttataaaataatacctaagattaatcataccataaaacaagttcaatggaatcttttttgttaatttatcttcaaagtttctaagatttaaatttggaaaaactggcaggaaaaacatataaacacatatataatgtcggttaaattaagagtctcacagcatctgcaggtgtttatagttttagtttttctactttacaatgaaaaacaatttgactctgtgtctctatcatataagccaaaatctatcacataaacagcaattgcgatgtactaatataagaaaacattatatggatttactcacaatatctccaagatacatggacattgttgaaaacagacacaattcagctatttggagaatatgtcattctttactctctttccataaagatagatttctaaattattttattttatgaatttttctgattaacacattcttgttcttgcttctaacttgtcagcattcttctttttctaaaattacagccctcttcctccagaaagccctcgtagtgacatacataacctataattatttaaggtttaaaaatgtcttcaaaccggcaggactgtatacttaattgtatacgggacgcctcaggcatctagcaccttctctctagcttgccatgttctcttccactgctaaccaggggtcatcagaataaaaacttgcatgggccatatttatatttcaaggattacctatttgtccctggccctgaggggaggggttgatccagatttttaccaaatactccaagtgtctagtacattttgttgcactgtgtagtatttgatgaaggtgaaactatgacaacctttcacatggagtagagccatgcaatctcttctaagccgttactactaaaggaattggaggtcattaatccctttcttatggcttatttccctaggttctatttttgtctttaggcacttccacaagttttcaaagtctaaaaggttaattgccccattcttttattgctttatttcagacatccagaaaacataacacacaagattttgtttttaatttgaagacaatacaaataataatgcttaaaaaatgttgctagtaatcaaccaccttatccatggagaatatcatcttgatttttggagcagaatcagttagctctctgaatgtctatctcctttatactgatttggggccctgtctttgagttactgcaatatccattgacagctttaccaaacaagtgaatattttcaccccagagaagaggtctgtcactgcccttgaaacagaaacagacttgcagacaaccttgcaatggctcatttgtccttctgctgtgtgtcttgtgtaagtttgtatgtgaacctgtaacagcatttacagaagtgtggtgacctgatgctcacagatcaatagatgaagcaatgatggataatattgtaatatcaacactttacttactcttcagtaaatagcttgctattagttgaaataaagaattgtttgattttgaaaacatcacagatggaaccagtccttggcaagcttctcacatagaccgttttcttctagggctgctctctattatatatattacatataatattatatatatatatatatatttcttcacctccagcctcttcagaggactcctcatgggggcccccggccactctgagcttcttgcagtgtactctatggaacttcctgttgagccagcactcccagtaaggggctttcttcttcaaattcctttatctaaaaacacttttgtgtggcaacagcagtctcaccaggcattgctgacctcagataacttgctgaggtgggttagcttgcttttgcaggcattcctacttccttcctagtggcattctcctctgcattaggtcttcttctctttctttccttcccagggaggttatgtggcttctcaaagaaggtggctgtcattattgctgagtatcttcaagaagcacgctctgctgtgtgagccccaccaggggtgtgcgtgtctcatggctggcattattagctttcattccctttggctggcaagggagtgatctcaccattgcagctctcaggcaattgcagtctttggattttatttttctttttgcttttttttttttcttcctttctttttttttttttgttgttatttgtttgtttgtttgagacagagtctcgctctgtcacccaggttggaatgcagtggcgcgatctcggctcactgcagcctctgcctcctgggttcaagcgattctcctgcctcagccacctgagtagctggaactacaggtgtgtgccaccacacctggctaatttttgtagttttagtagagacagggtttcaccatgttggccaggatggtctggatctcctgacctcgtaatccgcctgcctcacctcccaaagtgctgggattacaggtgtgagccaccgtgcctggcctggattttctttaataggagcaggagactctgaaaggcctaaaacaattaaaatatttaagacacaaagaaatggcctttattagccaaataaataacattttgagttgcctgtagtggtatggtttggtaacctcaggtcaaaatacaaactgaattcacaataggggtcaatatatgtctctttacttcctgagaagaattattatcagagtatctacacatttaaaagcacagtgagaacgattaagatatattagggattaatgtgaagaagtttcataaattaccttattgtgaaaggtagatttgaaatgtcaacaaaaactaaactttcctaggggacataatagaaagaaaagataaacagcactagggaagaagttattcaatagtcgtctaaaccaggggtccccaacccctggggcacagaccagtactggtccacggcctgtgaggaaaaaggcttcacagcagggggtgagcagcaggtgagggagcaaagcttcatctgtattgacagccactccccgtcactggcatctcaccgcctgagctccagctcctgtcaaatcagtggcagcattaggttctcataggagcaggaacctatgagagggatctagctgcacactccttatgagaatcgaatgcctgattctacattatggtgactgtatcattgtttcattatatattacaatgtaataatcacagaaataaagggcacaataaatgtaatgcacttgaatcatcctgaaaccatcccccccacccctggtccgtggaaaaattgtcttccacaaaaccgttccctcttgtcaaaaaggttggggccctctagtctaaaccatgtggtcagaaggtattccatatgtgggggatggaagattagaggttgggaagtgatttaagcagcctttgctctcagatgagatttatttcaaattgttgttatatgtgtgtgtgtatatatatatatatatatgtatatgattttagttttattgttcagtagttataaactgtcagacttctaatttaagttttataagtcatagcttcaaactttcttctaggtctaaaaattggaatatcacagtcacttctccttcctgttgagtaggattttgccaccttgttttttttttgtttttgtttttgctttttatactttaagttctagggtacatgtgcacaacatgcaggtttgttacatatgtatacatgtgccgtgttggtttgctgcacccattaactcatcatttacattaggtatttctcctaatgctacccctcccccacccaccccccaccccaccacaggccccagtgtgtgatgttccccttcctgtgtccaagtattctcattgttgagttcccacctatgagtgagaacatgcggtgtttggttttctgtccttgcgatagtttgctcagagtgatggtttccagattcatccatgtcactacaaaggacatgaactcatccttttttatggctgcatagtattccatggtgtatatgtgccacattttcttaatccagtctatcattgatggacatttgggttggttccaagtctttgtattgtgaatagtgccacaataaacatacgtgtgcatgtgtctttatactagcatggtttataatcctttgggtatatacccagtaatgggatcgctggttcaaatggtatttctagttctagatctttgagggatcaccacactgtcttccacaatggttgaactagtttacactcccaccaacagtgcaaaagcattcctatttctccacgtcctctccagcacctgttgtttcctgactttttaatgattgccattctaactggtgtgagatggtatctcattgtggttttgatttgcatttctctgatgaccagtggtgatgagcattttttcatgtgtcttttggctgcataaatatcttcttttgaaaagtgtctgttcatatcctttgtccactttttgatggggttgtttgattttttcttgtaaatttgtttaagttctttgtagattccggatattagccctttgtcagatgggtagattgcaaaaattttctcccattctctaggttatctgttcactctgacggtagtttcttttactgtgcagaaactctttagtttaattagatcccatttgtctattttggcttttgttgccattgcttttggtgttttactcataaagtctttgcccatgcctatgtcctgaatggtattgcctaagttttcttctagggtttttatggttttaggtctatcatttaagtctttaatccatcttgaattaaattttgtataaggtgtaaggaagggatccagtttcagctttctacatatggctagccagttttcccagcaccatttattaaatagggaatcctttccccatttcttgtttttgccacatttgtcaaagatcagatggttgtaaatgtgtggtgttatttctgagcctctgttctgttccattggtctatctctctgttttggtaccagtaccatgctgttttggttactgtagccttgtagtatactttgaagtcaggtagcatgatgcctccagctttgttctttttgcttagggttgtcttggcaatgcgggctcttttttggttccatatgaactttaaagtagttttttccaattctgtgaagaaagtcattggtagcttgatggggatggcattgaatctataaattaccttgggcagtatggccattttcacgatattgattcttcctatccatgagcattggaatgttcttccatttgtttgtgtcctcttttatttcattgagcagtggtttgtagttctccttgaagagatccttcacatcccttataagttggattcctaggtattttattctctttgtagcaattgtgaatgggagttcactcatgatttggctctctgtttgttattggtgtataagaatgcttgtgatgtttgcacattgattttgtatcctgaggctttgctgaaattgcttatcagcttaaggagatttttggctgagatgatggggttttcaaatatacaatcatgtcatctgcaaacagggacactttgacttcctcttttcctaattgaatatcctttatttatttcccttgcctgattgccctggcagaacttccaacaatatgttgaataggagtgatgacagagggcatccctgtctcgtgccagtttgcaaagggaacgcttccagttattgcccattcagtatgatactggctttgggtttgtcataaatagctctcattattttgagatacgttccatcaatacctagtttattgagagtttttagcatgaagggctgttgaattttgttgaaggcattttctgcatctattgagataatcatgtggtttttgtctttggctctgtttatgtgatggattacgtttatcgatttgtgtatgttgaaccagtcttgcatcccagggatgaagcccatttgatcatggtggataagctctttgatgtgctgctggattaggtttgccagtattttattgaggattttcgcatcgatgttcatcagggctattggtctaaaattgcccttttttgttgtgtctctgccaggctttggtatcaggatgatgctggcctcatcaaatgagttatggtggattccctctttttctattgattggaatagttttagaaggaatggtaccagctcctctctgtacctctggtagaatttggctgtgaatccatctggtcctggacttttttggtttgtaggctattaattgttgcctcaatttcagtgcctgctattggtctattcagtgattcagcttcttcctggtttagtcttgggagggtgtatgtgtccaggaatttatccatttcttctagattttctagtttatttgcacagagttgtttatagtattctctgatggtagtttgtatttctgtgggataagtggtaatatcccctttatcattttttattgtgtctattctattcttctctctttttttctttattagtcttgctagtggtctatcaattttgttgatcttttcagaaaaccagctcctggattcactgatttttttgaagggttttttgtgtttgtatctccttgacttctgctctgatcttagttatttcttgccttctgatagcttttgaatttctttgctctcgcttctctagttcttttcattatgatgttaggatgtcgatttttgatctttcctgctttctcttgtgggcatttattgctataaatttccctctacacactgatttaaatatgtcccagagattctggtatattgtgtctttgttctcattggtttcaaagaacatctttatttctcccttcatttcgtgatttacccagtagtcattgaggagcaggttgttcagtttccatgtagttgagcggttttgagtgagtttcttaatcctgagttctaatttgattgtactgtggtctgagagacagtttgttgtgattactgttcttttacatttgctgaggagtgctttacttccaattatgtggtcaattttggaataagtgtgatgtggtgctaagaagaatgtgtattctgttgatttggggtggagagttctgtagatgtctattagttctgcttggtgcagagctgagttcaagtcctggatatccttgttaactttctgtcttgttgatctaatattgacaatggggtgttaaagtctcccattattattgtgtgggagtctaaatctctttgtaggtctctaaggacttgctttatgaatctaggtgctcttgtagtgggtgcatatatatttaggatagtcagctcttcttgttgaattgatctctttaccattatgtaatggccttctttgtctcttttcatctttgttggtttaaagtctgttttatgagacacaagtattgcaaatgctgcttttttttttgttgttttccatttgcttggtagatcttcctccatctctttattttgagcctatatatgtctctgcatgtgagatgggtctcctgaatacagcacactgatgggtcttgactctttatcctgtttgccagtctgtgtcttttaattggggcatttagcccatttacatttaaggttaatattgtcatgtgtgaatttgatcctgtcattatgctgttagctggttattttgcccattagttgatgcagtttcttcctagcattgatggtctttacaatttggcatgttttagcagtggctggtactggttcttcctttccatgtttagtgcttccttcatcagctcttgtaaggcaggcctggtgatgacaaaatctctcagcatttgcttgtctataaaggattttatttctccttcatttatgaagcttagtttggctggatgtgaaattctgggttgaaaattcttttctttaagaatgttgaatattgacccccactctcttctggcttttacggtttctgccgagagatccactgttagtctgatgggcttccctttgtgggtaacccgacctttctctctggctacccttagaattttttccttcatttcaaccttggtgaatctgacaattatgtgtcttggggttgcttttcttgaggagtatctttatggtgttctctgtatttcctgaatttgaatgttggcctgccttgctcggttggggaagttctcctggatatcctgaagagtgttttccaacttggttcccttctccctgtcactttcaggtacaccaatcaaacgtagatttggtcttgtcacatagtcccatattttttggaggctttgttcatttctttttactctttttttctctaaacttctcttctcacttcatttccttaatttgatcttcaatcactgacaccctttcttccagttgattgaatcagctgttgaagcttgtgcatgcgtcacgtagttttcatgccatggttttcagctccatcaggtcatttaaggtcttctctacactggttattctagttagccattcgtctaatcttttttcaaggtttttagcttctttgtgatgggtttgaacatcctctgttagcccggagaagtttgttaacaccaactttctgaagcctacttctttcagctcatcaaagtcattctccgtcctgctttgttctgttgctggtgaggagctgtgatcctttggagaagaaggggtgctctggtttttagaattttcagcttttctgctctggtttctccccatctttgtggttttatctacctttggtctttgatgatggtgacctacagatggagttttggtgtggatgccctttttgttgatgttgatacagttactctctgtttgttagttttccttctaactgtcaggtctctcagctgcaggtctgttggagtttgttggaggtccactccagaccctgtttgcctgggtatcaccagcagcagctgcagaacagcaaatattgcagaacagcaaatattgctgcctgatccttcctctggaagctttgtctcagaggggtacccagctgtatgaggtgtcagtcggcccctactgggaggtgtctccaagttagtctacatgggggtcagggacccacttgaggaggtggcgtgtccattctcagagctcagacaacgtgctgggagaaccactgctctcttcagagctgtcagacagggacgtttaagtctgcagaagtttctgccgccttgcagttccatctcggactagcagtgagcaaggctctgtaggcattggatccgttgagcgaagcatgggatataatctcctggtgtgccatttgctaagaccgttggaaaagcacaatatttgggcgggagtaccccgattttcctggtacagtctgtcacggcttcccttggctaggaaagggaaatcccccgaccccttgcacttcctgggtgatgcgatgccccgctctgcttcagctcaccctccatgggctgcacccactgtccaaccagttccagtgagatgaaccagctacctcagttggaaatgcagaaatcacctgtcttctgtgtcaatcacattgggagctgcaggccagagctgttcctattcggccatcttggacatactctgtttttttttttgtttttttttttttgaggcagggttgcgtctgttgtccaggatggagtgcagtggcatgatcgtggctcactgcaacctccacctcttggggtctagtgatcctctcacctcagcgtcctgagaaactgggactacaggcacacatcaccatgcccagctaatttctgtattattattatttttaaatagagatgaggtcttaccatgtttcccaggctggtctcaaactcctgagctcaatgacctggctgcgttggcctcccaaagggcttggattataggcctaagccactgcaaccagctttgccataatttttatgacttaacatcacgataagctttattttttgataagtttcttgtctcatcattggtatggaatattttatatggattataggtcaagaaaaatgataattttcctgtagtctgaatttcatttttcttattaagatgaaaatgtactttttaaataactacagtattttaatgacattacaatacgttttttacttatttgttcattaatttgataaatattattggggacctactttacatcagagccctgctaggtggtggggtagaaatagaaatatattaaggtaaagactgattcattttctgagtgtctatatgaatctaacaaaaatataagcaagcatgcttgaataataacaaaaatatcaaactaagtaatagacaaaacaactccccatctcttcttaactctcagaagccatctggatttctcaccttattggatgaagaaagtcaaatgatttggtcagtggaatcaaattttccaaaaaaactacaaagtctcctagaatcctcaaacacaaatgcggtgtactcccccatgaaggatgggaatgggaatgttgccctcaaagaccacggtacagccttcaccatcatgcactacgcaggaagggtaagtggccagaactgcataatttttcatgtgcactaatgatcaaaggtccttgggacaagctctagagttattgatattttaaggtgtgttatttggataaatggaagctggatgaacaacccacaacatgtacttttctaagtgattttcttttagcctgatgaggaattaacatcttcagaatgatgacgcacactgtgtgggccttctcataatgtttctagaattataactttatatgagcaaaggatccctgggtttaatacaaagagctctgctataaactttggaatattattcataatacagatgaacattggacatctgagttttcttgccttgaatatagtttttagtattaaagtattttttattaaagcatgtcaacttaaggaagaaagaaagccactctctcatatctttcccaattctctaaccaggtttgtaaaacatgcttcttacttcaacaccttcaaggacttcctcttacttgtataaaaatgatcattctccttagtccaggctaatatcaggtttctccaagctgatcataatttttttccatatcttaacctgccagaactcccctgtgcaagatctctgttcaggttatttttctcaaccactcagtgtttctgcattttcagcctcccttaaactccattacattaagcttgatatatcttccttgtcttcttaacaagatcaaattttatccaactttcagtattaaatccatgtttgtttatcctcagtccaaatcccagctgtagttaatgtcttccacttttgcatgtacagctctctgtctcctactcttaactcctttgaccccacttagtacagatggcgtgctagagggtaaaatctctcaccgctgtcttacagtgtatttcagttcatttcgaccagtgtttctagactctgccttatgacaaagaaggagcatttgagaatcaaagatgaacgaagcctattccttgccttcaaatatctcagcttcgaatagggaaaggcaaatgaacaaatattaatatgaataatgtattacattgatataataatatcaacaaatgtatatattacgatagggaaggaagcaatgcgtggcttaaaaaatgtgtagatgctttccaaacccagaccttcaaaggtgattgagagctcactaattataaaagagaaggggggacattcttggaaagacatagaattttgattcaggattcagttgtataggagagaatccattctacctatttaagtaggaaataatatagtttgagaaaataatcattgggagactctaaattgaactttcaggaatgacattaaaagcacaccacagaaaagagttactaagacagttacagccttatcttagatcaggaagcctctagccaaattaagaagctgctgctacagctactgctactgctcccacctgcacaagtagcgtgtgcaaaccctagcactcaacatcaaaggagtgagggactagacctggagattcccactgcaagggaaaatcatcttcacggaggctcaccagctaacacagcagaagcagcagcagtgtggttttcactgcatctacttctgagtcttgtgccatcataacagactggtggaagctaaagagcaactggatcccagtgcaaggatatgtggaaggcaggcttctccttttcagccttggcggtacaggcagcaaccaggatgcatgggcgatgccattccaacacagcacctacctagtatttgggaagttgtgtcagaagttcagtgcagggtagaaagggcggtaggtgacatgtctaaaaagattgggtggggccaaatcatgagtaaatatgcatgtacaaccaagggctttgtcctcttaacactgttaactcacgaagtatttttagacaaagtaggaagatgaagcaataaaaacaaaaaagcagagggcctgatacaggagatattggtatcatagaaaccaagagaaatgaagaaaaggggtcaataggaaatgtacctgggtgatatggtagttaggctaaacaggagctttgagaggcattagagtggcaaggcctcagaaggctggggtggtgagtggcacgtcagaaggaaatccatggaggatttttatgtatataaaatgtatatgtatatgtatgtataatatatacatataaaacatatttatatatacaaatatatatacatatatatatttatatatacaaatttatatatacaaatatatatttatatattatatatttataatgtatttataatttttatatttatatattatatatatgtatatatttatatatacaaatatatatacatatacatatttatatatacaaatataatatacaaatatatatttatatattatatacaaatatatatttatatattatatacaaatatatatgtatatatgtatgtattatatatacaaatatacatatatgtatatatgtatatattgtatatacaaatataaacatatgtatatatttatgttatatatacaatataaacatatgtatatatttatgttatatatacaatataaacatatgtatatattttgttatatatacaatataaacatatgtatatatttctatattctacatacacatataaacatatgtatatatttctatattctatatacgcatataaacatatgtatatatattatatatacgcatataaacatatgtatatatttatatattatatatacgcatataaacatatgtatatatttatatattatatatacgcatataaacatatgtatatatttatattatatatatgcatataaacacatgtatatatttatatattatatatacactatgtaaacatatgtatatatttatatattatactcaatatataaacatagtatatatttatatattatactcaatatataaacatgtatatatttattatatatacacatgtaaatatatgtatacatttatatattatatacacatgtaaatatatgtatacatttatatattatatatacacgtaaatataggtatatatttatatattatatatacacatgtaaatgtatgtatatatttatatattaatacacacatgtaagtatatgtttatatttatatattatatatacacatgtaaatatgtttatatattgtatatacatataacaatatataaatttatgtatatgtttatgtattatatatacaaatacaaatttatgtatatatttatatattatatatgaatataaatttatgtatatatttatatattatacagatataaatatatatatttatatattatacagatataaatatatatatttatatattatacagatataaatatatatatttatatattatacagatataaatatatatttatatattatacagatataaatatatatttatatattatacagatataaatatatatttatatattatacagatataaatatatatttatatattatacagatataaatatatatttatatattatacagatataaatatatatttatatattatacagatataaatatatatatttataattatatatacaatatataggtatatatttattatatatacaaatacatgtatatatttatatatacaaatataaatgtacatatttatatatacaaatatatagacaaatatatatacaaatatatgtatatatgtatatatgcaaatatatgtgatatatacatatatatgtatatatgtatatatacaaatatatgtatatatgcatatatacatatatacgtgtatgtatacaaatatgtttttatatacatattatatgcatattctacatttatatacatatatttatattttatatttgcatttattagatatttatattcaataaatataaaatttattaaattttattaaatacttatatatttaatcaatacatatataagtataaaatacataaatataaaatatgaatatatgtatataaatatatactatatatttctatatgtatatatttctatatgtatatatagaaatattatatatacaatgtgtatgtatatatttatatttatatataaattctcatatatttatttaaatataaatttatatacataaactataaaaatgtatacattttaaatataattaaatataattcatgttctttgaatttgagagatttcactattacaaattctttaggaaaacagcaatcttagacttgtatttcaatttttcaggctatattttcttcatagttaatatttgttgaattcatagggagtattttacaatttacaatgaggtatgatgatttcaggaaattacttttcctaaggtttcatggaagtgactgtaagcggatatgtacttgatgtgccttctgagtctgtttgtactgtgtattggagatgcactagatgttcaataaatgctaattgcattaaagtcagtggaaatgtgctttggaataatagtttttaaatcattttatgttcagtttaaaaaattgtacattcacttaaaatttccagttttagtttcaaatatttttagaaaatttttgggaaatcaactaagtttaagtcaatgtaattattttgctgaattctgatagaaataaagcaaaacagagaaaaccaattgattagttggtgcacagcctaaacccctgtggaaacatgaatgttcctgttaaatcaccttaattttttaagcaagatttttctcatgggagtcagttttgtggttttataaaaatcttttattgtactgagatgtactaatgagtcttagccaaaagactccctgaggactcattcacatgttcagtgtagattatatgtaatttgtggcaatatgtcaagccatatgccatttgaataatcaaatgtagacacatacacttaaattttgagctactgcagtttcaaaaaaagcagcaacacattctgaattttataaatcaagacacgtagaaaaagttaactgatttgaaatcaacatgcaaggtctagtttggacaataggaggaacattgctaaatagctctatgatagtaaagttgggcccaagcgagagctcaatggccctggggttcttggctttattgccactgttttggccagaccgatggggtagaatgtatctccttcatcaccacttgctcctccacgatgggattacctggtctttttactggaaattcattacatttcataggaaggataattattactcctggatgatattggcatccagccccacctggagggactcacctatcctgaaagctctgaccaggaagaccggccacgcttcagagtcttgtttggaacagaggctctgaggtgcttttagaaatgtttaagcaacattatttaaattatagctgaagatcttttctaaacacatttgaatttttcattactcataggagcacaatatattttccaatcaccattacagaaatattttaaagtaaatgggaagaggccgtacatgaaatattaacacagtctcattaatgagcatgaatctgaattaaagaaggcttgtagggttttttggctagatatttgttttagcaaatattaaatcatatatgggattatcacttataggggcttctcttaaaagtctgatgatttacatgatggataagcattaaattcagaatgtgtctaattttattggctattaaaattaagaatcttgaaagaagaaagaattatgggttggagaaagacattggctcttaggaaagttaaatttccattaagatgattctaaactaactctagtaagaaatagtatttttaagttcctaaattttgatgtgagatgagcaaatagattaggagatagtaaaacaacattaagtaataaaaattgcattaatgaaaatgtaggtcaaaagtaatagttatacaatatatgacacctacctatatgagccttgtttgttgtctgctcataggatctttgtctgaaagttgttttttatgaaaatttatattagcatgaagtgaatctctttggatctcagataagcatcccattgtgattggcctgaatggtttataggcaacaaattggtgatgtgttcttacacctaagatgatgcatccctgtttcagctccttctccccacaaatgcttatgcattataatgggctgaacgggagccctccgaaaatattttcaggcccctattcatggagactgtgaatatgatcttatttggaaaaagggtcttcatttatataattaagttacagatcttgagatgaggagatgattctggcttatctgggtggtctctacgtccaaaacctactctaaaagttaggcagagagagatttgagagaaaagaaggaggccatgtgaccacggggggaggtattgaagcagccaggagccaaggaacacctggaactcccagaagttggaagaggcaggaaggatccacccgttgagcctggtgtgggtgggccagattccagagtgctggcctccagtggtgagagggaacacttttctcttgttttgagccacctaacttgttatttgttgcagccatcctaggaaaccataaagtatttattggttcatcttgacagatgataagagtagtagttttatcagataacattgtagaatttccttgccacatttgattcgtttttaagtgattcctacacttctctaacccaggtttttgcacgtggttttccttacctggaacatcccttttctttgtctttccaaatcttatccatcttccctcagatcaagttcttggcctgatctgaatttccttgatctcattttgccctactcaataatgattcctgaagcttgcatgacattttccagtttacaaagtacttctgtgacattgtcaccacattcttggatgtaaatattactatttccgttttccaggtaaataagccttggtgaagttcagtgattcatcaaagattgtacagcagcatattaatttcctaggcctgccaaaaccaagtactgtagactgagtggcttaaaacaacagatttattttttcacagtgctggaggatagaagttcaaagtcaagtgttggcagggttggttacttctggagactctgagggagaggctgttccaagcctctctcccagcttgtggtggtagccagccattggcattcctgccttacagaccccagttcctggcttgcaaacctatcaccccaatctgtgcctccatcacatggccctgtccctctgtgtgttctctcctcttctcacaaagatttaatccagccggaccgcatcttaatttagctgatttcatctacaaagaccctattgccaaataaggtcatattctgttgatctgggtggacgtgaattttagggtacactatacaagccactacaggctagcagtgacaacactgtgtcttattttcccccaagttcactgtgcttttctctcttcaccacatcgtggggtgacattcctaatgtgtttattgtctgtactcatagaattcatgtggcatagtggaaggagggtggaaagggcaggatccctgcctggggcccagctggccagggtttgatttccagctccattactctgtgcctttgaggaggataaggaccctcagttgccacaccatgatatttatcattaaagaaaatataattatgagcctcataaatttgtcctgaagcttaagtacaggacaagcaataaatgcagatacaattatttttactcattttttcaagtatgtgagtcatctatttccccaacaatggctgaaggtcttcagtgcaggaatacaacagtacttcgtaacattttgaactcatcagtcacagatattgaagaccagaaaatattgcaggagttatcgagtcaacttttgccatatattcagaggagaatattggtggccccattgagttgctcaaataaagtaagtggtaaagtgtccttgacttgtttaaaaaaaacagagtcaattcttttatcttataaaagtgctcacattatataaagtaatattttgaaagtcatgttagaatgtgtatttttatatacatgcggttactggtatcactttagtagatgataggaaaggtacaaccactcccattatattacagtattttctggcccttcttatgacacttgacttcagtggaagatatgtgcagaaaattgagatatttctctaactatagtattaaattaaatatataaacatataatataaaaaatatataaaaatattgtataatataacattaaattctctaaatatagtattaaatacagaaaattgagatatttctcaactacaatattaaaagagaaaacagaaaacaaaatgttttagtttatgttaatgtaacattttgtttttcacagaatatttgggatgctttgtgatgagtagctccctttgaagggaattttgtaaaaaaaatatatattctttaccatttagttttataactaatactttaatcaggcatacagttgtgtgaaatgttactgcacattttaaaagatcctttccatatgatttccccttataaaattaaaacattctctacaatttatatacatattttgagttgtaattttatgatggcataaaaacttacagccaccttatctagtgtgcttgcaaatacatctttctgtggtggattttgattgtatttgtcaggattccttcgttgtagctctaaaccacaaccctacagataaaattgtaatctcagacacgtaggccctgatcattactgttcatgtcactgatttccacaggcctttacgggaatcacatcactaaaacgttgctgatgggaatgacgtgaggaaaagaatgaagtcactgatttgtagcccgtctgtaaaatacgtagattttttttcttctgtttaaaaatagcgtatctctatctttgaataaactaagtttgaaatgttcctattgtttagatttatgctgttatgcaggtccccgagtagagatctttgtctcattgatgctgcaatgctgcagtcgattctagatgatctagtgatgaaagccaacctctttgcctttaaacattttttcttttctttttttttttttttttttgagatggagttttgctcttgttgcccaggctggagtgcaaagacacaatctcggctcactgcaacctccgcctcccaggttcaagtgattctcctgcctcagcttcccaagtagctgggattataggcgtccaccatcatgcccagctaattttttgtatttttagtagagacagggtttcaccatggtcttgaactcctgacctcaggtgatccactctcctcggcctcccaccttaaacatttttatataacatgcttgcgggatctctgtctgttgagcttctcagttccacctgtgtcaggaacacctttcataacgtgtcctttacctccctggagatttgtgggggacacattgtacccaagaagactctgagattgaacttttaaattaaaaaacaaaaaacatgaactaatcaacagggcagttttcatttgtttctctccttttctccaggcagaatccccagacataacaatcaaatcagtctggtctaagccaaactgatactcttaaaagctatttgacaaaggtattttgacctgcacagaaagaagttaatttacatctgtatttgttcacctcttgagcaggcgttttgaaaaataaaaagtagctctactaggctcctggtgttccactgctgacacgaatttcccctttggcagtattgtgtgggaggcatgatccaccttttcttacctaggttttgttaagacaaaatgtaatacctcatttagagaatcttctgcttcttcacatatttaatatattcttttatttcatgagctgacagaaagttataaaactttagattgttcagaatattgatagtttatggctagttggtatattttttcataaaggaatcaatgaggcacattcataaatttcagctgtgtcaatttcaagggactatccatatacagatttctagatatctagatgggactcttaacaacattactataggttcctaataaccttctttgttaattagtattcatcaatttaaagtgaatcagaaggaaagcaaaaaaaaaaaaaactagcggatagaatcacttaatgggaaagtaaaagaatagaagctcttgcttataaatattgatgatatacagacatcagtttaccactacagaagaaattgagactcttttcagcaaacctcagatagaaagctgaaaccaggcagggaaaataattggacacatttatatttgctgcaaatgatcacttatttattttgctaaaatccaatcttcacatatattctgtgatatattgaattcaagggtttatctcaaaactttgcattttaaattatcaccacttccaacaccagaaaagtggtttaattaaaaatttaattccaaccacttatttcctaaggattatcttttgcatcatataaataacatgagaaagggattataaatttgatggatgtatgaatttactttcattttgtgaatattgatgatgtttctcagagcagggagcttatcgactctcaagattcagttgcacatacacgatgattcccagatctccactctatttctgctgtgggctgcatattgactttttaatatctctattagtatagcatcttaaattcaacagaagcaaagtcaactaaactccctacccatctcccactcccactctttctctctcaactcacctcaaaaaagtaaaaaagaaaataaataaagctgattttttgtatttgtcccccctttcaattaatggcaaaaccagacacccaattaattaccaagtacaagctactgtctttcttatttaactctcaatccaaatactccacttcttatctcagtaccctggttcacatcaccctccttgttctctggactacttcagtagtccctcaacactaattgatggaatgagtactaattatcattaaagaataaaggaatgaatgaattttgttttgttttgatttgatttttgagatgaagtctcattgttgcccaggctggagtgcaacggcgcgatctcggctcactgaaacctctgcctcccagattcaagcgattcttcagcctcagcctcctgagtagctggaaccacaggcgcccaccaccacacccggctgatttttgtagttttaatagggatggggtttcaccatattggccaggttggtcttaaactcctgatctcaggtgatccacctgccttggcctcccaaactgctagtgaatgaatatttttacttaaaggaatattaactgcctcaaattcatttagtttttttgtttctctgataactctcttcaaagttaaatgtgattactttgatttgatttgttaataatagacctaaactattggcactgatggatgctctacttaccagttgggcataaatgataccttttaaacatttctgtccccaagcttatttctcatagttgaagaataaattttgctttctctcttcagaaccagaacttccaaattattttcacatttttgtttttcacctacctggtagtagaacagacacaattcagaagatgtaattgagattccttaatattttgggcttatattgctttttaaaatatattcggcaagattagttttttccttgtaaccagataaaaatttgggcagctccagtgatatttctggtctctgtctagtcatacaatgtcatttatttgctttacttggcactcacagacccaattcagtaactaagaactgtaatcgtcaaaacaacagatttaatggaaagtgaagtctcctcatgcctcagatactgcctagacattgtacggtggcctagaaagtgcctttttcttccttttcatgccatgctttgcctctactgatgtgcattgtttcactgtggtttcctgcacactgtgcttcacgtgtgcaaagctaacactcactcaggtgcttttctgggcgtcttagggggaccgactttcccaggtgtgggtgatgctcatctttggctggctgctccccctcgaccctggttttggggttgattccacatagaccctctctactggactccatgatttccaacttcccatgtgtctcttggcaggatttaacacagctctggcttgtgtaccagatgaagccctaccaccatatccttcgctatcaaaacctccatctgtggtgtggtctttgttttcatgtgctggctcagaacagctcaggccgctgcagcagaagccattatccctcccacatcgtcgcacatatccccatcctttgtgcttcttcccagggccaaaggccagtgcacagtatcttcctagccagtgagacaaggcaaaggtgtaagaaggttcccatgaagcctcccttctcttgacttagaggacaaaggaagaaaccgtggaaatgcacttatgtccacatttggatgttattaaagcaataaagcaatcgctattgtgtactcaaattgagcacaagatcaatagattgatagatgtagactttggtgtatgaagtaaatacagtagagagctagatagatgggcaggcacacacataaatcaaataccactactgacagacacacatgcatattagccatgctgtagtcttggatattcctacatgtctaacctgagggtagctttgttagaggaactttaacttttagcactttaactacatggaaatgtagatttcaatatcagaaatatattgaagatatatgtgagatactgtaattagcatttgatttgaccttagcatacctaacaaggtagcctgtgcaagcttcagaaaagtctctaattttaatgcagagaattacatataattctctaatttacatgtaaattatggataatcttagctaggtaagagtaatagggaaggaaaattaaggcgtatttataagagaactaagtagtgaatctctacacaatgcccctaaaggcccacctagggacataacaccatggttttgctattcagaggcattggtgtgtgcacttactgaactacagggagttgaagagtggcaacatccatgttttcaccctttgcccagggctccgtttcctctcgtctctctgttctgtagcctgtgaggcagtgcaccactgacaagcatgctgagacccattaggctctgtgcacaatactcattttgcagctcagacggcttctcctttcacatacagttctcctacagtggacgattctcatccctttgcctcgatctgtcagacttcgtcgtcccacattattctctttgctttcctttataccttcaagagctccattatctttctttaggagtcctaaacagtgctgtgcagcatctatccctgtcttttcctgagctacgtagcaggaaggagtttctcagctgtcagcaacaagacagagtagacaaaacaagaaaatggaaaattattgaggtccatcaggattccatctcaggaataaactgtactaaattttcaaagagcagaaaatgattacagggaatagattccccaggaaaagttaagcagacagacaagggatgctgaagtgatctagaggttatccacagcagaaagtagctgcattacctaaggttaaaggatcatgggaggagaagttacctctggaccccaggagctgagggcaggaggtggaagccacatgtttctacaaggccactactctggaagaattgggctatgaaaagtgggctgcaagacaaaaatggaatcagggaggaaattcagcccttgtaggagaggaagataattaccaaaacttggaccctcctcctgccttgtcattttctgcagtgcttttagggttgtagccctatctggaaggccaggctgagaaccccactgcctcaatgcatcttagggcagaaaagggcacagattcattcgagagcaaatgggcgtaccttgaagaaaaaagacatcacaaagcacaatttgtggcagagtccaggtctcttgaaagtgcatacctagacaaagttagagttgatagatacagacatataagttaaggctggctacccttggaaaaaggaattagagataatttttaattttgttacttttagtacattccaaattttacaaatgtatatgatatgcttaggctttatgtccccacccaaatctcatcttgaattgtaatctccataatccccaaaggagagaccaggtggaggtgattgaatcacgggggtggtttgccctgtgctggtcttgtgacagtgagttctaacaagatctgatggttttataaggagctctttccccttcgctcagcacttctccttcctgcagccttgtgaagaaggcaccttgcttcctgtttgccttccgccatgattgtaagttccctgaggcctccctagccatgctgaactgtgaggcaattaagcctctttcctttataaattactcagtctcagatagttctttacagctgtgtgaaaacagacgaatacaacatgtaacatattttacaaaatatttttaaaaggttagtccctgctgttttccttggcttattaaaaatttagtcttttaaccctgataacctcctcaatccaaggatgatattttaataacctttgatattagccatatcaaaggcaatctgaaaatctaaatagatgcccatttactaaatttacatataagccattcctagccccctaaaataatagttttgttgatggattatgctaatcgataaaatcattaaaattcagtgtgaagtggccagagatcaaaactcaattaaatagataagaaactgtggttcagagaagctgactatcatgttcccacaattaattatcccagcacatggcccatgagtgtttctataggttgagaagcagaaactataatagattgagaatcccttcttcttaacccttggtctattgttccttctactttaccacgctctcatttttatatcattttctccaaaattccaacaccatatatggcatatatagcgtaccacaataaccagggatttttgaaaaatcctgcactttattgccaccctcttagatgaaagtatttgaaagttttttttttccctctacaagaacttttcaaaaaatgctaactcccctaagaaaatagcttagccctgagtatacttatagtccaatctcatcttaaacctatcagcaatttaaaaatacgtcaatatctgctctaatggctgttctcagaaggactgtgtttctttatttaaaatgcactgtaggccgggcatggtggcttattcctgtaatcccaacactttgggaggctgaagcagatgaatcacttgaagtcaggagttcaagttcagcctggccaacatggcaaaaccctgtttctactaaaaatacaaaaattagccgggcgtggtggtgtatgcctgcaatcccagctactcaggaggctgaggcaggagaatcgcctgaacctgggaggcagaggttgcagtgagcagagatcatgctactgcactccagcgcgggtgacaaagtgagactctgcttcaaaaaaattaattaaataaaataaaatgcactgtgtacagttacttcctgcaaaccctgctcccttgctcctttctcacctgccagcaccacatagaaggactgagttaacagagcatcctaagctcctagtagctggagctgtgattctcatacgtaacgtgcatccaacttaactggggagcaagtttaaaatgcagcttcctggatttctctccaataaataatgactaaagaggtctggggtgaagttgaaagcatttgcatttttattaaacaccagaggacattctcctttagggaatctggaaagcacattttgacagacactaaaattattagccacatagtaggtgctcacatttcacagttttgcattattctctcactcggtacaaggcacagcgagaaaggaggctgcagacataaagaactcactattccccagctccagccaacccctggaccttctttaacaaggtgaagtaagccaattgctcttgctttcagttcagggaattaaaatccagtgttggtggatagagctatttctgtggcgttctcttgcctttggatttcagtttccttggtgattagccaagcatgagcctgacacccttcagttaggaagaaaatccatgtggtttggcactttgtaacttttgttctctttgtggagccaggaaactcagtgtcttgatgaattttgagtcacagacatggtgaaagttttataccccttttttcatatatagatgacataatttatcttttaattgtatttattgcagtgctggagtgttacagcaagtacttccaaaaaagccgcatactgtcactgctctcaagtttatattgcacccctcatttggcatccacactggagcatttaaatgaggatcgctaactgccgcagcataagcaaaatgctaagttttcttttgagttattttattgaacagaatcattccaaaggaaattttgaatacatgacaatttccttaaagatccatattgagtcgcatgaatataaatttctctattacatgcatgagagacgctgccatgtactgcatgaatcctgtcttccaatcttgagaaggaaaaataaatacataaagcctgaagatcagttatgtaaagagagtggggaaaaggaaggcataaacccagcctctatctttggctactttcatgcttttctcctttcatcccacaaataataaaccaaaaaagatgagcaaggccctgagccaagcagctgccctgagtgaccctggagagccttcgacctaaaatcttctctctgctgctccagcagcaccaacctgctctccccagtggcacagcagagagcagacctttgtgtgtcagcagacctgacactccagactcaaaaagctctaggtgaattctaatacaggctgagtttctccttagtgctttttctttcctagaaatgcttccatctcactaggctctgaggctcactttcctttgaattgcccgggaggccactggccttgtctgcactgttgtgcagcttttctttgtttcttctctatgcgaagttattgccccttcctggagctggaggcggcggccctcagtgaagtccaggtgctgcgtatagatgctgatgagtttaatgggctctcctttctagggagacttcttttcttaggaagcatttccttcataagttgtcaatcagtgaatttcacctgagacaattatgggtctagaatgagaagctttttattgggaggcagcctatttagcagcctcaagacagattacctaggtaatgccatgagtccttctcaagtaagtcatgtataaaactctggaaaacggcaaagaagaaggtacaggtgagcattagaaacatcaattagggatattcatgagaaaactatagtaaaaactatgcaaaggtaggtaggaacaagcctttttatttatctccaaagccaccgagagacacacagagagagagagagaaagaatgggagagataggaagaaagagctagagagagaggtcagcattactgcctatgtgttgtagatgagaagccttggaaactcagtaacttgccctggttatccaggccctggggcttgttgaagctggactccagaaggtatgtcactgagcaaggccaatgcacttttgacaacagcttgatgcctctcagagacttgggcctagaaaggcagagttggccttggttgctggagaagctggaaaggagtttattgaaaggaaaagcagcagtgatggcaagggaggaatctgtgagtagggtagaggaaagtagggagtacaatggggaaaatgggaaaatgctgtaaagcgaaggatttaattaggcaaaatgtacatatttctgtagacagtgaggatttatcagggatccaacatgatcgatcatcaagttagatattttttttccatttccctcttttcttcagaattaactcccaggttgtgatgattaacttatgtgtcggtttcactgggccatgggatgcccagatggctgcttgaacatcatttctgagggtgtcttcgaggtgttttgggaagagattagcatttgatcagtagactgattaagctgttgccctcgctagcttcaagtgggtgggtgggcaccacctaatcccttgagggcctgaatagtgcaaaagagaggaaggttgaaatctctctgcttgactgcttgagctacaatatcaatctcctgcccttggtactcctggatttcgggccctctgacttagactggaatctacactattggctctctggctgtcaggctttcgaactaccttgtcgactttcctgggtctccagcttgcagatggcagattgtgggacttctcagcccccataattatgtgagccaataactcagactatatatattatactatactactggttctattcatttggagaaccctgatgaatacaaagcttttgtattcatttaagacaaaaagaaaacattcgggctgtcttagtccagattatactttttttttagaatcaaatttgttatattttttaaatcaaaattttaaagaatctttttagttatatttattgaaattacagttttccttttagtgtgcacaatttttcaatgcataggtttatttaggatcttagtactgtgctaagattctaaatggatatttttctcctagctccctgccactgtgatgatatcaaaggaggcttggtagggggttaggacttccagcactgtgcagagataataccccactacccaatttatgaaggctatgtaggaagcagtaaagaagtgtttcagcccattccactgctcatcccacagccagggaagaatgactggaggcttagtggagaggtagagcctttatcttcacccagaaataatgaggattcattcttcttgcatatcagaggaggctgggtagggacctagacatctactctgacaaggcagtagtgaggctgtgccttccttctcttgccaagtgctggaaggagccagctagacagaaagtgatgctggaaacttcaacaccctcctctcaacaattggtaaaacaatgacataggcaatcggcaagggtgcaggagaactgaacaacaccatcaccaataggatctagtcaatatttataaacacatccaccagcaaaagcagaactcatattcttttcgagtacccatgggacatgtgtccagatggactatctgctcggccgtaaagcaaaactaagcaaactcaaaagaattgaaattatacagagtaggtttgcctaccacaatggaatcaacccagaaatcaataacgggaagaaaacagccaaatctctgtatacttggaaacttaacagtgcccttccaaataatccatggataaaaggggaaatcgtgacagaattaaaaataatatgctgaacctaatgaaaatgaaagtacaacatgtcaaacttgtgtggcacagctaaaatagtattgaatgagaaatgtatatcactaaatgcgtacgttagaaaatagggaaaatctcaaaccaataatctaagctcccatctcaggaacgtaggagcaaaataaaccacagtaagcaaatggaaaccgatgacaaaaaagcagaaatcaatggaattagaaaaaaaggagaaaatcaatgaaacaaagagctggttctttgaaaacaccaataaaaattataaacctataatatgagtgacaaagagaaaatagaaaatacataaatagccaatatcagtaataaaacaaggaaaatcattataggccctgtagacatcaaaaagatacaaagggaatattacaaacagctctcacacataaattctatgacttcgatgaatggatcaattcctcaaaaaacacaagctacttcaattcacccaatatgaaatagacaatttgaatagcaccataacttttaagaaatgaatttgtaatttaaagtctctcaaaaaagcttcctattccagattgtttcactggagaattctaccaaatgttttaaggaaaattaaagccaactttacacaatcttttctagaaaatagaaaagaatactctctaattcatttgataaagcaagtattatcctaacaccaaaaccacacagacagtagcatacacacacacacacacacacacacagagagagagagagagagagagagagagagaaaattaaaaacaaaaaacatccctcatgaatataggtgaaaaaatatgtttaatatattagcagatagaacttagcaatatataaaaagaacggttttggtttttgttttctttttctggggatgcacagctgattcaatatctcaaaatctatcaaggtaatcaatcacatcaacaggtcaaagaagaaaaaaatacatgattatatcacaggatgaagaaaaagcatttgataaaatttaacatccagtcatgataaaaatcaactcccagacaaataggaatggaaaagataacctgaacttgataaagagtttctacaaaaatcctacagccaatattatatttaagggtgaaatctggatgttttacttctgtgatcagaaacaagacaaggatgtctgctctcaccactcttaacataggctgctggaagttctagcaagtgtaataaagcaagaaaggacataaaaggcaaacagattggaaaggaggaaataaacctgtgcttatttaattgcctttgtgtaaaatcccaagaaatctaccataaaaaaagaaaggaaagactcaaagaactaataagtgagtttagcaaggtcacaagacacaagataaacattcaaaaaatcaattgtatttctgtatactagcaatgggcattgaagtgaaccatacaattacatttacaattgctcataaaaatgcaatacttaggtgtaaatctaacaaaatatgtagggaacttgtgtggcgaaaaccacaaaattctgataaaataaattaaagatctagataaaaagaaagacatttcatgtttatagatttgaagacaatatagtgtcaatttaatagtaatcatcatagtaatcagttctccccagattgacatataggctaatgcattcctatccaaatcacagtaaaatttttatagatataaaggtatagatgataccattctaaaatttacattgaaaggtaaagaagatagaatagctaaaacaatgtttataaagaagaatgaagtgggaggaattcaccttctccatttaacgtccttaaagcatgttacacataggttaatggaacggaataaggacacagaaatagaaccacaaaaagggactcaactgattttggggaagtgaaattgtttataaattggcaacatgcgggatccgtgtggtgatgtaaatattctatattttcactgcattaatgtcaatatcctggttgtgatagttttgcaggatgttactattgaaagaaattaagtaaagagtacacaagatttatctgtatcatttcttacaactgtatacaaatctaaacttatttcaaaattaaaactttaaaaatatttaatggtaatagaaacaggatacatgtagacacaataaagggcataaatggacatcatttatttcgattttcaaattgcctttttttttttttccgagactagagtgtcactctgttgcccaggctggagtgcagtggtggcgtgatctcggctcactgcaatctccacctcctgggttcaagcgattctcctgcctcagcctcccgagtagctgggattgcaggcgtataccaccacacctggctagtttttgtatttttagtagagacaggttttgccatgttgaccaggctgatctcgaactcttgacctcaagtgatccacccgcctcggcctccaaaagtgttgagattacaggcatgagccactgggctgggccctcaaattgcctttgacaaggccaatgtgaaacttcactgatcaaggaaagtatcacggttaaaagacctaatttggaatcgagtagtattttatctttaaatggaaaagaaaagtatttgtgcatgcttgtgtgtgcatgtttatgttgtgtatttaaattacttggctgtgtccactagaaatacctagaaacattggttgatccagtactcaatcacacaatgtgctattgtgaatccttacagttcagatggtctccatgtcatttctcttcacaaaaatttgcaagatgtcccggagggaatacttgattccaaatttagcaccaggaaaagacagcaacaacaacaacaacaacaaaacactgtttgcaaccatgtgttaacaatccacgaatgccaattttatgtaacatgttatcaattgtttgcattattatgaaaaaatgtataagctatttgcatagtctctaatacttgtgttcatctgtcaactcaaatcctgtcagtactggtcatctatatcttatgaatagggtcaaaggcttttaaagttggagggcccttaggtaatattatttaacacattaagaaagactcaaagaatgtaaagagcttgtctgatatcacaaaaataattaagctcacctgcttcacaattcgttaacttcatacaaatgtccttttagcaataaaaaaagagttactaaacactatgcttcctacaaaaatcaaactgccatcagcaaatgtttgtcgttgtatgtggatgttaaatgcattttcccaggtaacagtgaattgaagtctccaaatgggagtttttttactttagtttgaatggaagaccttcagcattttctctagatatccacgtaaaccgggtgccatgtatgagaactttccaaagaacattatcttgtgctgatgaaagattagttagcattatattaaataaaaatgacagcacaatgttatgctgtatttagttacagtataaccaaaacttgctatccatttcactaaatgattattgattgcatccaatagacaaggcattgtgctggctgctgcagagacagaactgagaaatgcgtagtcatcgccctgaagacacttggtagcagttttaccagggaagtttggaagcactatcaaaaaacaagcccatagcatgaacaaagataggcaagaaatgtatttaatgaaactctgatggtccagttgtgcgtgtgtgtgcatgtgtgtgcgtgtgtgtttcatttgaaatcatcggatttccatgcagagactaagctagaattgtagattgtggctatatagaggaagactctatatgacagagtcagaggttctgaacaggagaaatgacattctcagtttaatgtatgcatcaaatagcagtgttgcattaaagtgaggatgtaaaaaggccagtacttagcctttttgactatttgtctgtcaaaataataagtgatggtttttactagtgtgaaggtagtaaatataaaaaagcagggattgaagggaaaatgaggggaaagctgcagccattggcagatgacagggagccgtcctgggggaggggatcccagatggcaccctggtttctaatctacataacgtgcagcagtgaacatgaggaaggagagaaggacgaatgaatgattcagagatttcaagtgagagagtattgaatttttaagtaagaaatatggccatcttctgagaatgagccaatctgggctggggctggaagcttgaaaagaggcaaaaagatttctaacagttactgtgaggattgtaatgtggcattatcaagaggtgaattggggaacttcttagcagccagacagggtccatctgagatgtcagaatgaatttgtggcagatgcaaatgataccgaattacagtcagatccaatgattgaccatgtcattcactacaattaggaatgactgactatgatgaaaaaaaaaatggtggcagcttatcagtggcttttgctacttaaatgctaagccctaagtttcaggttttcttgagacctgaaagaagtcaaaataggccgttgctttagaaactatggatgaattgaaggaggggagatgccagtgggaatgaaaagcatgtttagaaagtggaagagaataacgttaataggctattagagatgagagtcaggatttgaatatcttggaggtagggtacttccaaatatttgcaccagaaatactcaaagtcatggagaaggatatgattggaggcatttggatgagatctttagtaaatccatagtcctttttgatgtaactgaaatgacatttgaggaagctaggaataaagtgaaaaatgaatcactgatactcacagaatttgatgatcatacctgttatatagtatgccagaagaaattatctcaacttccattaattttctagaagtgaattggaataactactaaagtcatgtgagcatggttgggtaagagcacaacacagtaggactttgtagagattacccacactatttgtaaccccttatacttcaaataacttgtttttggtctacaaagcaatggcagaatctcagctcactgcagcttccgcctcccaggttcaagcaattctcctgcctcagcctcccaagtacctgggattacaggcgtctgtcaccacacccagctaatttttgtatttttagtagagatggggtttcactgtattggtcaggctggtctcaaactcctgacctcgtgatctgtccaccttggcctcccaaagtgctgggattacaagcgtgagccaccgcactcggccctaagaactttcatgtatattacatcacaatattaacagtgtggtaatgcatttttactctcattttaccaagtaagaaactgcagcactggaacattgaatgacttgcctaattccacatagctttgaagatgtgttgacttctccatggttttgctgggcactgctgctcctaactcaggaaggcatagggaagccaagcctctagatggaggtttcttgacctcagcactatgaacatttatagccagataactccacgctgtgggagcttctctgtgcacacacggatgtgtagcaacatctctgcccaactatcacccccagttgtgacaggaaaaatgtctccagaaacgaccaagtgtcccctggaggctatgattgagaaccattgctctaggttgtataaattgttcacatttaacaacgtatggtgtgtcacatcatatgtagctcacatttcagtatcactaagccatgtggtggcacaagtgcaaactggataattaggtaatggtttacttgtacctgaaagtagtttaagattttggcattgtcccccagctcaactgatcttctgacccaaatttattggaaaacctgggaatgtgtgggatgccttattacttctgttttatttaggaccttgtaacagcaaagaataaaaactcagcctttatgggaaaggtggagataatcaggcacccattgtggcagatgcaaatataaaagcctatagaaaggaagttgcatcagggatcacccaccttttccaggtccttccacagtctgcacagccctttcttcatagtttcttctgctgtctctaatatccattcactgcaaagaatccagtcctctctgggctctctagacaaaattcccaaagaactcaggttagccatccatactacctcatgggtgacactcaaatgtccacaggcataactcttatactcccgcatggccgaggcacactctccctcaggcgaggaggcaaattctccctcacggcggatgctcgccctccctcatggcggatcctcgccctccctcatggcggatcctcgccctccctcatggctgatgctcaccccctttcttggttgttgctcactcttgctcaggagtaaagaggcctcactggttttgtgtctcccattatccactaccggtccacactgggcagagaacagactatgacacactgaccgtggtctgtgccccaaggtatattttcaaaggtaagccttttaaagaatgtatggctgatcagcttcccatgaccactgagatttcacacttagttgacactaagagagacaacaaactatttcagtcttcaaagatcaagtttctcagcctctactagtaggctgataaaattataacatccttctaattgattcataaatcacctatggtgaagaagattgccctttagaaatccagaattaattgtttcctatgtgttcttaattgtaaagacttaagagtactaattctttaagtattcaagcagaactttttaaattaggagactattaaatttctcaaactgaaatcacacttcattccaaaagtttcgcaagtgtgtttacttggtttagtgagttttctgagcaagttagagtccttaagaataaaggagactacatgaatgtgaaccgtcactatttgctcttaaacttggcgatcaaaggagaccttcacaaaatagaacagaagagggttcccttgtttaatgtacagaatgagaacaggcagattatagcttggaacttgcatgtaacgtgaactgtaagacctgaagacacttcttttatgaatatttgaaaacttcagctgggtcaagttatcctttaaaggaatttattttcacagtcatgttgaatcattagtaattatgctgctttcttttattctaggtaatgtatgatgttgttggggcgattgaaaaaaataaagactccctttcacagaatcttctatttgtaatgaaaagtaagttgattttttttcctgccctacactggttaaaatgccatgcatccgttatttctttatctctgaatattttcctagaaaatatgctaccagctaaagcataattgaaatgccttttgcattctaatgcccagactaatgagaaatgggtcttgctgcactatatgttggctacaatgtaatttggagtccaatggaaaccataatttaactaagcttttagcagatagaaatgtaaaatacccttactactttagtgggttgaatatagaaaagcttttctgtgaagactaatgaagatgagtatggcttccaacgttatttaagccacaacagggagaatttcattacttaagatgactctggagcacaactaagggtggtattttattcttatgtactttcagttataaaatattcatgctcactatgtaggaggagtagaaatagaaggagtatatatatgtatacacaagtaagtttaaatgtataggacccttctacttaatgagcattaatactttatatgcatatatctactataattctacactatatacaagactgtatacaaaatgtatatatgtgataattaaatgtatattcatacatatatacataattctgcctctagtaattattttcttaacagcagttctgcagtgattcacatttttctaataacctttatagtgaattaaaacattgcatcttgtatgctttaagttgctataaatgaaatagtcattcatctttaaaagaagcacaggatagctttttcgtgaaatagttgaatgctctagcattgaaaataagaaatctatatcacttctggtttgagaaacatatttgcctcaaattacagcagcacagctgtaatacactgtttttcactgaagattattctgcttgcttctcagaacttatgtttattgtgagttctcttagctaaaactaacaaaaaaaacaaagaataacattatgaagacggaaaagaattggtcttatttattatcattggaaaatcttccttttagtgtgctattatttgcacttttatttataatgcacttctcttttatggagatctaatatatagcatgtatttaaaagtttacacaatgctttttttacttttgtatttcatgttaataggatatgtgtgtgtgtgtgtgtgtgtgtgtgtgtgtgtgtgtatatttagaatgaaaatatgatggctagtctgcttatcttaatagagtccctgtattttaaaatcattcttttatgtaaatttgtacaaaaaaaagttccaggaaaaaacaattcagtctttttttttattctttaggaggaaggtgcttctgagcaaaaggacagaatttacaatgtacccttttgtatttatacaggaggtgtcagatttttttttttgtaaagggctagagaataaatattttagaccttgtgcaccataagatccttgttgcagttactcacctctgctgttataatgtgaaaaacagctgtagacaatacaaatggatgtgactgtattctgataaaattttatttacaaaaacaggcagtgggccatgtttggctcaggagccatgattgctcactcactctatcataaaagcaaaatatttgtggttgccatcatgttttatgaatctgtgaaatactttgatgcttgtacatatttattaaaagcaagtgtaattcataaataataatttttatttgcaggtactttgcttatagtatctaattcaattttcgtagcatcaaaaagctcccagttgaggaagatggtgaggtctgttgtagaatgtacacaagcagagctgagtctctgagaccactaaccaggtacagtcagggagcttggagacagctcatagagacacacagcaaatacactcattagtgcctaagattagaagtaaagtctacttcactcaaaaggaggcagaaaaaaaaaaaaaaaaaaaaagccgaactccagacttttaattctgctcacaggaatagaaaattttaggatttaggaaaatttaggatttactgtcaattatgttaataattattgagtcttttttttttttttttgctgtgtgtctctgtacacttgcttataagttaggttatccctctttacaggtagaaagaccttgtacaatgattgtagatcccagtgagggacacttccgctctcagtatttatatagagtgacatgaagaaaatggtttgtggtcagtgactccttgtaatcccagtgagagaaatatgcctcttcaccaggagttcctttgctcggttttaagaggcaaatggatagtagagttctctttaaagtcctggaggaacttgctgtctcctgccatgtgctcagctgtggtcagggctctcccgttagggcccaaagcgtgatggcatctccctgtgcccataggatgacatggatcttgctatatcttcatgcagcctgaccacatgattcagggaaaatacaaaactgggtcagttacatattttggaccatatttatgtctcatgttttcagttttttaaatcttttatttttctttttaaatttttttttgtactacccaccttctcagtaatgttttcagttttattagaggcattttctcaattataagaataaaatgttgcattgcttatctgtgggttcacttatacatagacctgctataactataaataattatttaagttggctatactattatgtatttatcatttaactttttattttgaagtggttttaaacttaaagtgacgaaatcattataaagtactcccaggtatcctcttcccagattcatttttttcattacctttcttttaccctcttgctatctttctttctatctctttccatcttttgttctcctctttccttcctttgtcctgtgtgtgtgtgtgtgtgtgtgtgtgtgtgtgtgtgtgtgtgtgtatgtgtttactttctgaatcatttgaaagtaagttgcttgcctcttcttgtctaaatagtttggtgcccaccctgagacgggacattatcttacataacttcagtaaattatcagaatattcaacagggatgtactactcatatctaatccagaattcatataaagttttaccaattgtcccactaatattagtcttttatggtcattttctcctaattcaggatcattgattgcatttagttatcatttttcctttaaatctgagacagttcttcagcttttctctctctttcatgactttttttaatgccagttaattcgtagaaatcgctctgtttgagtttatttgctatttctttattttagaagcaggttatgaatttttggccaggagtcccaagaggtagtggggtatccttctcggcacatcacattcggaggcagtcacggtttgaaacaggttcaccatgagcactgtgataaggcggtgctcttcagctttttctaacataaagcttgctgttttccctttgttattaatgagtaatttgtgagaaagtactttgaaactatgtaaatattctgttcctcatcaaacttttacccattagttttacatgcgttcatgattcttgcctaaatcagttatttcttatgattgcaaaattttgattttcttaccccatctttcaataaacagtggcattctgctataataattcccactgctttattaattatttatttatgagtgtacactcatggattcttatgttattcaatgaataatgattaattactatgattatactgatgctaaaattgtttgagacttgaccagtaagaaccccttcaaagctagctcctatttctttttgacatagtctcttgactttttttttttttaacactgccttacattctggccttccaaaaatgttccagaatcatttaccttgcctcaaatctagaatcagacatttgttcaggaagctttgatttatcttagaaaagaatggtattcagaaactccaagatctggaggctgggtgagctcattgctactggtgtatgattgcttttaggaccttttggaatctgaacatttaagatgtaagtatagataacatataggtgtatagatctgtaactctgtattaagaatcatggatttctcttgctatctctaatttcatcccaacatcacagggccccttttgcattgcataattgtatctccttttcctgacagttcttcctgcttccctgttcgtttattacctaatgtagggatttttttaatggaaagcattacagatatatattatgtcacccgcattttgcacctgggcaggcaaaataatttgagtatggcaaaggcagaaactaaacactttgccacaaaacgttgccaactgtctgattggctaagcgtgatcctagtgatttatgttcattatttcacattttaattttgcagtgattctcaaagtaggtactgtcatcattattttataggaaaggacacttaggcttaaaaaccacctacattcagatataagtaacacaagaaacattccttttgacccttaaccgccacatacattgttttccctgtgatttttaaatttgtaatccaaaatccactcaactgagctctaatttcttcctgaggtgtcaagaaaggaatatggactcatggactcagaattatttgatttttataacttaaacatgaaaatatatcattttgcttttaccttttcagcttaactgtgttttttgttatttgttttgttttgttttgttttttaaataaaaggacacttcttttcccttctttcacctagcaactggtgcaccaagtaaggcaggtcctctcacaggtacttacagacggctctgagacaggtgagttaggtcctggggaaacattttcctgagtagttattttcctggaatggggcgtttctaatagagaccataagtcttcatgatttgacaagtgcacaaaagccccttaggtctgagcaggtaagatttggttctgaaaactaggatagaagtgttactcagttagagagcaaggcccagttgggatcaagactcctggtcaagggtagtgaatgtcagaatttgtcaatgatattaaatagtggaggaaataaaataaggatacaggaaaaggtagactcctcaatctgctgaacgaatgacgtcttgcacccagaatgtatcagtggctagagctcttgtatgaagaataagttcaatgcttaagtaataattttagtgccacttacgatattcatttatttatttcctagctagtgaaaatgtcgtgatcaatcatttgttccagtcgaaattgtcacaaacaggatccctcgtatctgcctatccttcctttaaattccgaggacataagtctgccctgctcagtaagaaaatgacagcttcttcaattattggagaaaacaagaattatctagaacttagtaaggtaggagtttttatgattattgttggattatttttaattttgataagtatatttgcttctttttttttaaaaaaaagcacaattttaaataccaaggaaatagatattctaatagaaagtattaaggaaaagaatgcctatctgatgtataaccatcagaatgaaggaagagtagaggaaggtgcagcagagtgacaattttaatagtaagtatagtccgagtcattttattggttgtctgtgcaacatcccagttctgtttcatctctgactgcctttttgatgaatagaaggtaacttcagatactgtaggcttagagggagtaaacttagctatcttattctgttgatattaatcacttcagataactgaggtctctaaatgataaattgttgtttctcttatagacgtagggtgttgttcaggtgctaggatgtttttactgcatgtttgtagatgtttaattttattgtattatactaatttgtaatgtatatttgtctcgcaaaagtttggttgtatacacaaactcaagattctatgtgccaaaagagaactaaaaactcagtgaagagttgtttcaaactgataggaaacatgtatggaatgttttaggtttcttcagaatccagtgccagatggtattccagagtgttttgcttatgtctaccaaaactataaaagatgaggaatatatttgggaaggtgttcaggacaatcaattttagaaatgcaattgttgcagcttctggaatacattttaacttaccaattaaaataaaagcataattaaattcaattctattttagaagagtggccaaaatgtgtaatatgagtgtgagtgagtgtgagtgtgtgctccagccagtggcttctagaataaaagatcctttgatgtagttgtttagaactaaatgatcatgagaattagtctctgccacatagaaaatggcattttttacattaaaaaaaaagaacccaagcttatccttataagaaagatctctatgactggaggtcttcctgaaccttctggcccctcttttctcaatcatcctaaaaatcaagagcaaaaaccatcacacactgctaacctcaattattaaacattacgaagcctaggtgccattactcttttccctaaaggactgcagaagggaggtaactcacagtagttcctccacccagaaagggaactggagtgttccatttcaagggacagacagctatttattatgattattccttaaatgttctatttctcacttcccttcaaactgccttcatccatgcacagccacccctgtggccaggaaaataggattttccctactctttaactgagcatgacacgttgtattgtgtttgtagaaaacgggttgatcttggcccaatcacttcattttacgttcacttgtcagtaccaatgaatcactttagattgacagtacatcttaacagaagaaaatgagctattgtcataatagcaaaagcactaaatccacaagaatgttatctcagatttccttcttgtatcaagaccttttttaagaaaaacgattttagatcaataagtccattagtctaatatataattttgtgaaatgtaatagtaggttagtggctgaggttccttttaaccctgggtggaatttaattaattaccttccgccctttatttctgccctttatttcgttttggcctcattttcactgattttatgtctctatcatcatgtaatcttttctacatatgatctttttcttttcagggctgcacatatttgcttatttgaaaaaaaatagagtctactaccattttttacagataggtaatttagtaaccttttcttagtagttataaaacgaggaagaggaggaaagggaagaaaaacatggtaagaaagcatcagaccattcattcattcaactcctgagtgtagttaaatttaagggaacaaaccaatgataattgacacataaaatctttgtaacataaaacaccatcattttgccccagagtaaactacatttcatgataaatatgaacagttagtagcataaccaggatatgatcgtgagtttattgtaccaccaagcaaatgaggatctatgtttattttcacactaaaatgagtgcaggatggtgatagatctgatttacacaacagccctgtacttgaaaggttggcagtaacagttgttattttacaaatagttgcccatttcctcaacttatacaccattacaaaaatcacttggcactgatttgtacgaactgtgttttaaatccacatttgcctgtaagtgaatgtacatggatgtgagacttaatattttgctcttctgaactgaaatttagtaaaataaatttgctcactttttctttttctccattctgtcttctttccttcctttcttcctccttcttttcttcttccttccttctttctcttttttcctttctccctcccttcccttccccttcctccctccttttcctccttcttcctttcctttcctttcctttcttttctcctgtccttcttgtctttctttttattacagttattaaaaaagaaaggaacttctacatttcttcaaagattggaacgaggagatccagtcaccatagcatcacaactcagggttagtgacgttttcagatttcaaaaacttaatgtatgtttatagcaactaaagagggtttatgtagacttttttttccatttttgacaacttaaatatcttcacaaaaaaagtaaacatacacacacacacacacacacacacacacagagtaaatgcataatgagatttaaagacgtaaagactttttatttaaaaactgctttatatttttagctagtgtctcctttggagaatcagttgggttctacttctctccttagaaatcactaatggatattattggaaaacttcagaagtgcactccacacttcattcattgcatcaggcccaataactcaaagctgccagatacttttgataatttttacgtgtctgctcagctacaatatattggggtcctggagatggtgaagatcttccgatatggataccctgttcgcctttccttctcggatttcctgtcaaggtaaattcttctgctcttaaaatcgtcgttctcgctgctgttcagtgcagtgtactgacactgacactattgtagcaagggtcttctgttgtcttttttggcactgcttttgttgtttacttttttctatctccaataaacaaaatattctgggaaacaatgaaatacactgacaaagctcacataaaaaataattaaactgtactgaggacagtatcttggaaaccattctcatgttcctttcaaagtgtggctttccttggattaaagttttgtaaaatgattgcatgtgatatttactatttattatttaaaaggagaatgtatgtaagtgattatttccccttttatatatgaacaaaatattatttagatcagtggttggcaaactacactcatgggccagccaaatccagcctaccacctgtttttgtaaataaagttttattggaacatggccacaatcatttctttgcatattgtctgtaaccacttttgcactgcaatagagatagacagtgtgccatggtgtaaaatatttgtaaaatgtttcttatctgcccctttagaacagaagtttgttgacctctgttttcagtaaattcagctgaaaaatacactgtgcacaagacagtgcactcattcctaggataagctcttgtcacgtgtcctcatcttcatgtctgtattagcccttctcccatggtagccttatcccagccatttgcaagaagcacctaaactcaccaaaagcaacatcatcccctcaggctacatatttgttcatttgtattttatttgatcagaaactttagtctgattttaagtaaattataatcctcactgatgaatccattttaagtaaattggttgatgggtagtaacttaatttacagatatatgctactaagcactattccaggcctcatctttaggtacattgttgtgctatacactctagcttgatgaatgtcccagtttagacaggtaaatgcatacgcaaataatggccattcagtgcttgtaatattacaaagggttggaatattacatgggttggaatattacaaagtgttacagaagcatagtaagaaggtaatttgggatcagagatagctttcaaagatatttgaaagatattacaatcctggtgaaaataatgagactatctgtttttaagcattcaaacaataaaacaggggtgggcaaaaaggaaatcagaagacatttggtaattctatataaaataaatgagatcttaaaataatactgatgtaaactaatataagtattgcaagtgtgaaatctcgcatttatgtttaaaaattaactatacaactacagtatgaaaaagtctgtttgataaaccattcatccaaaaaagagagattttgagacttttgttgactagttcaatgtgagccactattttgaggaagctgtgaaacaaaaacaaaataagcaagccaacaaacttaaataactacatttgaaatatttaattcagaacaaagggaataatatttaaacgatgactaaaattctgtgtttaatttttataacatttgttttcccagaggaaataagccgcatttacttattgtgcattttggtaaattttataaagacacatagaagaaaataaacaacatatgagttcagcttgagccttccattttaaaggggtagtagaatatgtttagaagatagaagataagcagaaccacatggggatggatgtatttaaactgtagaatatgtatttcagatagacaagatatttgtgtttaaaatttaaaaggtgcttgtaaatgagataatagacatgttgtctcttaatttataaggaataactacaaagttgggcttacacagaaataaatcaaagctggatataatacttctgggggttgttttggacaggagtcatagtagctatcactgactgttgcagggctttgggaaggacggctcctgactcgtctctttctggtccctcggtggatatcccttcatagtcttcagagatgccgaacctgttaagagctgatatttcttacattttatagtgtgtgtattaaaggtcagccctcccaccttcttaagtgtagatggcctttggttcgagtttaaaaatgttcttgtgtaagtttaaaacaatagattccccaaatttatcccaaactttctgaatcagtatcaacagggagtagggaccgggctccccctggtttgtagctccagagatgattcaatatgaaatagaatggagagtgtcagtcctaaggctgaggtctcaggaagtgatccgcgggggcctcagagggtgatgagccttgagacgttacaatttgtttaactgtagtaactccctctttagtgttacccaaaacagcagttctctgacatgagtgcacatcaaaatcacctggaggcttcttaaaatatggattcctgggctccccaccccaagttcagattcagtaggtctagcggaggcctgtgaatttgcatttttaaaaagtttccagctgatgttaacattgttgccatgtgaacggcactttgagaacccctggcatggaatctctagtcatctggggacaatgtttttgttttgttttgcttccccccagccaaatgttgaaagggtgccggtgccttggtgatcaaagcaaacttgtggggaatgtataatctccagcctcaccccaggttcactcaatcaaaatctgcaaattcatcagaattcctcagtgactggtatgcagttgaagtttcagaagcactatccaggcagaccttggagacgtagtaggttcagtgatggactaccataataaagctaataccataataaagcaaatcacataaagtttttggtttcccgctgcatataaaagttatatttgcactatcctataatctgttctgtgcaatagcattacatctaaaacacaatatgataccttaattttaaaatattttttgctaactaatgctaacaatgatctgagtctttggcaagtcataatctttttgctggtggaggattttgccttgatgttgctggctgctgacccatcaggctgatggttgctgaaggctagggtggctgtagtaatctcttaaaatgaaacaatcaagcttgctacatccattgactccctttcatgaaaaatgtctctgtagcatgcgaagctgcaacagcattttacccagagtagaacgtctttcaaaattcgagtcaatcttctgaactcttaccactgctttatcaactgagtttatggaatttctaaatcctttgttgtcatttcaacaatgttcacagcatcttcaccagtagtagattccatctcaagaaaacactttgttcatccataagcagcaactcctcatccattaatatttgatcatgaggttgccgcagttcagtcacatctccaggctccacttctaattttggttctattgttgtttccaccacatctgcagttgctttctccactggcgtattgaacccctcaaagtcattcatgaagatgggaatcaattgcttccaaatcccattcatgttgatatttttacctaccataaatcacaaatattcttaggagcatttagaatggtgaatactttccagaaggtttccagtttgctttgcccaaattcatcagaaaaatcactacctgtggcacctatatccttagagaatctattcttacataattcctccttgatccatgggctgctgaatggatactgtgttagcaggcatgaaaacaacattcaattccttcagcagtttttgggtgaccaggtgcattgtcaataagcaccagtattttgcaagaatttttttctgagcagtagttctcaacagtgaacttcaaatatttagtaaaccatgctgtaaattgatgtgctttttttcatatgtttgttggccgcataaatgtcttcttttgagaagtatctgttcatatgattcacccactttttgatggggttgcttttttcttgtaaatttgtttaagttccttgtagattctggatgttagacctttgtgagacggatggattgcaaaaattttgccccactctgtaggttgcttgttcactctgatgatggtttcttttgctctgcagaagctctttagtttatttagatcccatctatcaattttggcttctgttgcaattacttttggtgttttagtcatgaagtccttgcccatgcctgtgtcctgagtggtattgcctaggttttcttctagggtttttatgggtttggcttttatgtttaagtctttaatccatcttgagtcaaaaccacaatgagataccatgtcagttagaatggtgatcattaaaaagtcagaaaacaacagatgctggagaggatgtggagaaataggaatgctcttacactgttggtggcagtgtaaattagttcaaccattgtggaagacaatatggcaattcctcaaggatctagaaccagaaataccatttgacccagcaatcacattactgggtatatactcaaaggattataaatcatgctgctataaagacacattcacatgtatgtttatttcagcactatttgcaatagcaaagactggaaccaacccaaatgcccatcaatgatagactggataaagaaattgtgacacatatacaccgtggaatactatgcagccataaaaagaatgagctcatgtcctttgcagggacatggatgaagctggaacccatcattatcagcaaactgacacaggagcagaaaaccaaacactgcatgttctcactcataagtgagagttgaacaatgaaatcacatggacacagggaggggagcatcacacactggggcctgtcgggggctggggggcaaggggacggagaccattagggcaaatacctaatgcatgtggggcttaaaacctagatgacgggttgataggtgcagcaaaccaccatgacacatgtatacctatgtaacaaacctgcatattctgcacatgtatcccagaacttgaagtaaaattgttttttagaaatggatgtgctgtcatccatgctttgttattccatttatatagcaaagggagagtagacttagcataattcttgaaggccctaggatttttggaattgcaaatgataattggcttcaacttaaaattaccagctgtattagcccctcacaagagagtcagcctggccttcgaagctttgaagccaggtattgtcccatctctagctgtgaaattcctaggtggcatcttcttccaatcaaaggctatttcacctacatagaaaatctgttgtttgctgtggccacctttatcaattattttagttagctgttctagataacttgctgcagctttacatcaaatgtgctgtttctcctcaccccttcatgttacggagacagtttctttcctcaaatctcatgaatcaacctctgttatcttccagcatttttcctgcagtttcctcacctctctcagccttcataaaattgaagagttagggcctttctctggattaggctttggcttaagggaatattgtggctgatcttatcttctgtccagaccactcagaccttctccatatcggcaataaggcagtttcaccttcttacattcgtgtgcccacaagaatagcactttgagtttccttcaataacttttcttttgcattcacagcttggctgtttggtgcaagagatctagctcttggcccgtcttgacttttgacatgctttccctcctaagcttaatcatttccagcttctgattaaaagtgagagatgtgcatctcttccttttatgtaaaaacttcgtgaccattgcaagtttattaattagtctgattttaataattctgtgtttcagtgaatagggaggtccaagaagagggagagagaggtgggggaacacttggtaggttgaacagtgagaacacacatgacacgtattgatgaagtttgttttcttatatcggtgtggtttgtggcacgccaaaacaattataatagtcacagcaatgattgctgaccacaggtcaccataacagatataatattaatgaaaaggttttaaatatgacaggcattacccaatgcaaagcagagaagtgaagtgtgaacgtgttggaaaaactatgcttcaatttgtgaaaaatgcaatgtctgcaacaccacaacaaaatgaggtgcacctgtgcaggatgcgaaatgggatttatctcactcagccaataatagaaaagtgcatttagtgtattttttttctgtttccttaatgttattagagttccttagatctgtgacatcaaagattctcttcattaaagggaccttagtggttgtccagcgtaacctttgttagctacgtgaatatttctaaccattattccaacagttatccaaattgctctatttccccagaagagagtggagggagaaagagagagagagagatatcataaaattagaaaattatttttacctttgcttttgtatatttccaagtcagttttatatacactctgttaggattacgcttttgctaaaatagtaaatgcaattaatacttaaaaattgagtataatttttatatgtatgcaatagactataacttcttctaaatgaggatcgtatcgtattcattcacaatgcttgtgcattgtcggtgttaaacaaatgttttcaaaatgaacttggcattggagattaagtggtcgttcattttaaagtaatatttctgcataacagagaccataggcatactgtaaaaagtacagtgagtaaaaaggaatagtgaggatgagaaatggtacttttaggtaattctttgcatttcttttagcattcctttatttgaaataagatgtgatttctctttcttatctttatctgtaatggcatatcagtggaaatggaattatgaatttattttagaggaaatctgcccctatctctctggcatttaggatgccagtctgaaataatattacaaaaaatattgattcatagagagattatcagtttctgtagaaactgaagaatttaagtaacatacaatcaaaatactgttacatcaagaaatagcatattttagtatttcttgagtattcaagaagctcatcaagtctttgaaatgcctccaggcaatggaaacatcattataaaaaacaaagccttgaggtgtaatttaatagaaatttttggttgtttgtttggttaccaaattttcaggtaaagaatgtattatccctatgcaaaatatttattttgtatttatatcaccttgtcttaactgtcagagaataaaaatctatcaaaatgacttcattaagtatacaagaaagaatatgattaccacaaaaatcttgaacaacaacaaaaaaatgtccagttttgccgttgggaagtaagcaaccactgctttgaatgggatttattgtttctgaagtctgacatgacaataaatgtggataatggacatttgttggactttgtaggtggacatgaggttgtaaatttgcatcatggtatcttggctgtaataactgtccatcattctgagtctttctaattgaaactggaggatcgctttagttgagaggatactattttgattaaatatagaaaagtatgcttgtcaatatttttttctgtttattacttgtgtaatacagcttcagagcgggattataaagacttaaggactctgtcttcaatggcaagagacttcactagtttggagacaggaggaacaataaaagaagcagcaggaaaattatgtgcaaattatggtacataattggattgcctacagctgtggacttactgtgtcctcctgtaaattcatatgtgacttcatttggaggtggaacctctaagaaggtaattaaagttgaatgagggcataggaatgtgactggcacaagaatgtggctggcaccttgatcttggccttctcagcctccagaactgtgagaaatagatttctgttttttaagctgctcaatctacagtatgttgttatagcagcccaccccaactaaaacagccgtgtttgtgtgttcatttggtgtcaataggcagcaaagttatatatattgtgtttggaattttggaattaagtttatgttacttgatacttatgctgatagaaggaaatatggcttacctgaacataccatgtggtttcaaagattttgaggcatcgtatgtgtcaatcccatcatcttttctaccttgtttccttcactgctattcaaggttcactcaggcatcctctcctttggaagacattttataaaataccagataagttggtatctctaaggttcaaactgtgttgtataatacaattatcatatgcctattagatcatgctggaaatatccatgtatgtattcatttcaaccaccagaccagaggttagaaaatgacagccactgagccaaatctggcctgccatctgctttcatgtggcctgagagctaagaatatttttttacatttttaaatggttacatttaaacggttatataagtacctatataatatcctcagttttgcctcttagcatgcaaagcctaaaatatttactctctggccctttacaggaaaagtttgcttatctctgccttagaccataaaaggggtttgcctggcttccagcaagaggctggtcacccttcctgcctctgcatccaaactctgtgcaactgaaggaaaaagtctgatctactcttcagtagatctcaataatgttctctaatgttggtctcattcttcagtttatcagatcttttactgatggcactgtaaaagccaagttccaccaatatgttctgtagaacaaaaaatcctaaatcagtggcttgcaacagcaaatgtttatttctctcttgcattgcatttgagtgtggtttagaagtagcatacctaagctcaaaccagctccaatctttgttgttattattattgtttttgtttttaatgggattcaggtttaaagactagcccagatctaggatatgctcttcctgagtcatagggaggaacaaaaaaaaggctgaatgagtgttacagaggctactgaagtgtggcctgtgtcattcccaagtatcccattggttaaaaccagtcacttggccaagaccaacatagatagggtggagaagtgccctcctcatagggatgtactgcaaaacacataacaaagggttggaaatgcatcaacttctggctgaattatctgttattgtgtattggaccatccccaaactcagtggcataaaacagccatatatttttttctctcactgctgtgagctaactgggattagtgggcaatgcttgcttggggcctcttccccagttgcagccatatggctgaagaagtgggtgttagctaaggcctggctgggctgggggatgcacacgatggtcccttcactcctatgcctggtgcctctgttcctccaggtgactctctctctggcagaatagcccagactttttacccactgggtcaagtttccatggacaaggaaagaagcttgcagccttcttaaaagctaggcctggacttggcacagcatcactctcgctgtattctattcatcaaagcacttgaaaccaacccagatatgttcaatggggagcatccatgtatagccccaatttgagacaagctactatcctttaaaagacaggacttgcaagtgatgggaaagaataaaaacccttccacagccatgtctatacatattaattattattttcatctctccccgatatgtatatgttagtttaatgtgttgaataatataaaaccatttatttttttcaaaattgtagaattgaaagaaagggtaataggaggccatgctgaaaaaaaaaaaaagaaaaagaaaatttaaaaaactgctttgaaaagtccctacaggagatgttttatatggtctcagccacctttcccaaagctgcctttatcaccctgtatgcttgtggaattctcatccatacatctttgtttccaatggtcatgaagggctgtggcagaattgtggtcctatggctctctctcaaggtgtcactcctctccatcttcatcccggcttatgaggaacaaacatcggagtcttaactccagatccggggtagcaaacttgcataggtcacatccatcagtcatttaaaggattatttatggttggcagagaagagtagggtaactaaatggagaagtttactatttaatgaggagaacttatttggaaaagacagaaggacttgtcaatgaaagcaccagagggttggctattatgcttggcatggtgagggaccgtgagctgtgtttttagattgttactggatgaaatccctctcagaaatagcccgaaccatttagcttgcctaaatgacacagttgttgctgaaaagcctcactatgaaaggacacagccatgatgttaaattgggtgttcggagagggatgaaagaagacacacttccatctattggattaaagctaacggacagtggctacccaatgaggcagaccctcgctagagaaacagcctgtgctggagtcttttaaaagtctgccttgttacatgttggagatgccaactactgtcaatgcatcctttagagaagtgtgaattaataaggtcaggagatgttaaatattcttaacagcttgaattagcagacgataaactttctccaaggtaattttgccaaatctaaccattttctttctgctgaaactgttcttgagtgttggctgcttgtttaaggtttaacgaagtttgagaggaaagaggacctgtaacttttcaatgaaatgtaaaagatgacagaggagcttaaacaacgcttccagaagtcactttagcttaaatgtaataaagtatatctttactgagaatttgttatgctgctcagtgcattatggatcataagatttcccatattattcttcaaggatctgcacactttttgtataaaggaccaaatagtacgtattgtagactttatggccatgtggtctctgatccagctgctcaactgggcctctccagcagaaagcagcggttgacagtatttaaactaatgggtcaagtggtgttccagtaaaccgacaaaaacaggaggtggctggttttggctcaagggcaactaaaccttgatctactcgcactcagcttctttctaatatagttggggaagattttttagaaaaacggacgatttgaaaggcaacttggctgtttcgtttcataatctggctcggatcctaatttctactctaccaagtggtatgatcccccataacagcatccactcattcgttcatcattcatttcttcattccttatttgctcactcttatttcatacaagcagtttactaaatcagaacgtcagtgtaacttaggagtctgcatgaatgcagcatcacagtcatcatcatgggtcaccgctgtgtacctgctgggagtcggactccacactcttcactgtatactcactatccttctccttataataaccatttagagtaactactctcattatgtagacatttgttattatgtaattaatatttgccatagctttgatttaatgtttttccaaataacatttatcagtatttactaggcaatgggcactgcgctaagcccttcacaagcatcatctcatttaatcctcatagcactcgtgtaaagttgattattgccatcattcctattttacagctgagaaaacagttcccaggaggtaggttcaaagtctcacatctcatccctaagggtgtctctaaccactacaggacatgagatttgtactgatattggccctgttccaaagtagttgttggttccaattcttccacaatggcgtgctgtttctgaggcttgactgtcattagcatccaccctcaattgcacaggcacatcaggacggcactgtgacatcaggtgaaaagaaggccttggagagttctaaaattcagctgtgggccttacactctggattgcctttggtcggcttcctgaaaaacaacccagttaattttgtagagtttcctggactgcagccagtcccatacctctcaccagccatcccacagactcgttcgtggcgtaaggcagctgggtatgaaatgaggctgaatcagtcacaacctttggaaaatcagctcaaagaacaataagaaaagcgatgtctacaaatgaaggattgtacattttcgcttaaaacaatgtgaaaatgaaaataaaaagtctttaataacttcctaacaacctaacgacctctgaaacaaatacgcaaagctgaccagcccaaatgatttaaaacgaatatataattccactgagccaacattcaataccacacaaatgaaacgaaggtgattattccaggaaaataaacagagatctatttgcaaccctaattcaatattttgagagttgcaatatacttttaatacaattgtgaggtccataaaaaaattcagtcccagaattctgaatatttttattaaaaaatgcaatatcagattttgaatcttggagcttgaagaagcagagggaaacaactgtttctttgcaagcagtttgttcacaagttttcttccctagattaacgattaaattagtctaccacttcaccttcctttaggaagtgggaaaggttagagagtggcccagcaggtcactctgcctccatctccaaggaagcatcagactagaagtttctctgtgtagcgttctgccatgttttactttctggaactgctggtctcatccagtaaacttataataatgggcatggctatacgcctggggtgatatttagtctttaagaatattctttctctcatcttcatgagcacaccacttcttcattgtgtatccttctgggaccactgataagccatgaattttttttttttttttttgaggtggagtttcgctctttcttgcccaagctggagtgcaatggcacagtcttggctcactgcaacctccacctcccgagttcaagctattctcctgcctcagcctccggaatagccgggattacaggcatgtgccaccatgctcagctaattttgtatttttagtagagaaggggtttcaccatgttggtcaggctggtctcaaactcctgacctcaggtgatccgcccaccttggcctcccaaagtgctggaattacaggtgagagccaccgtgcccagcccagcaatgtaaattttgtacccaaagaaactgaaatgggtcaatagtcaacaatgtgttactttatcgatctccaggccactctacattcaaggctgtgaattcattctatttcccatcccaaaccttgccctgacacattgtccaatgtagttcatcagggatcctgtaaccagaataaatgaaagtgttaaaataaaacaaaagagcagttctaataataaaatcccaatagcctcgatatccctccatatttgactggaagtctgcttccattattaagttcccagtgagaaaggaaagttcaaagatcaatatgctttgtaaattaaagtccagagatattcagttccaatggaattgaaatcccaaatctgattatcttgcctttctgagttaaatgtccaaaatttcgtatgcataagttaaattattgtccccaaatcatcctttgcattttcttattttactcagtcttagctaaagaggttccagacatcttggtagagctgagacacttcagcattgtagtctgagctgtcaatcattgtattagcctgcttgggctgccatatcaaaataacagactagatggcttaaaaaacattcattttttcacagtctggaggctaaaagtccaagattaaggcaccagaaagcaagctggcatctagtgtgtgcttgcccctcagttgtagaggtccaccttctcactgtgtgctcatatgacctcatggcttttctttggtacatacatgccatgggaagtcaagaaggaggtcgggggagtgctagctttctcatgtctcttcttataaggacactaatcctattgaatcagggccccacccttatgacctaatttagccttaattacttctcaagggatctatctccaaatccagttacattggggatttggagacttcaacatatgaattttaagaggtcacaagcattcagtccataacacttatctcaatagatgtggctaatccagggcctcacttgtcttaattcagtgccaagtctctcatgatctttacattgagagtccagtgaataaatagcaggcacaactattagggcactaatctcacacacaattaatttagaaatctgtctctagtcttcagagcagtgtattgccagcagaattattctagaatctaatactgtatgtggctaaagacaatggtgattttatagtgtatggaccaaaccaagacatatttcatagtaaaacaaggaacaattaataattttaccaggaatataggtattaaactgggactgtcctgacaaagcaggacatacagtcatcctatctttatactgctccatcttcccataagtctcattggatttcatcaccaggattctgtattctgtaattcccaatagactctaagctccattaaggaaggccttccactgtatgcccatcgcctggcactagtgggtgaccaacaggtatttgttgaatggactaacacacaaatgattaatgttttagttttctgtatagttttatagttgagctctaaattttgtgtcttaggtgtaatgtttattgatatcccatacaagacatatcaatagacctaaacagttgttattatcttaccagcttaaagagtttggtttaactatgagtaaatgtttccattttagggtagccatttactctttagagtgagataatgatcccaggttttgacattgggtgggttaataatagtctttctccccaaaaaagcaccctgagtcattttctgaaatatctacccatgtagtaactatgaaatgaggaatagattagtacttctgttttatcttttaaaggttacctttcattgttctttcttaggtctttgaaatgctttgttaactgacagcattctttgtaatattcctaaggtgaagcatcaatttatacacggaaatatgtttagggataaaaacatcaaatcacagtagacactgtattggtgatctcatgtttaggtgagaagctatttttaactgagaaaaattcagttagagctgacccactttacagtatttccacagaatactcatggcatgctctactaccaactacatcattgtgagaccctagcacttgaacttgaaaacttagttttgtggcaacttaagtactaaatacttatattatatgacataaagatgtccatttttatcagaatctattctggaataaaaataatttgttttattgtctagaaatccatatttttttaaaaaacacgtcatttgctaaagaatgaaaaggatgatgacaatattttttcaactttaaaatagtattcttataaatattttcgcatttatgacaaaacatctattttttataagttcccaactactgtctctacagttgtcaaaacttggataactttatattagaaagaaactttttatatattcaaaacaatgaaatttgcagaagaatgaatgctattacaaagtgtcctgaaaattagcagtgcgtatagtgagggaatgaggaaaatactttaataggaaatatgtgagccacctcaatcactgatgaatgatgagagacaggggcaatgtgacctttttccagctctgatcattatgacactaaaaatcagagtcccattcacaaatcagaatacaacatgtggcattcatcaaaattatgttctctgttttgaaagaacttcttctattaagtctctacaaggctaagaaatataagttaaccatttatacattagatttggtaaatcagtgattatttaacaatagagtaaaacatgaaaattatacctatacttttttttaattaacgatgacctacacattatttaaagattgtctttcctagaattaccaagaagagactttaaagaggaatcatcacaggaactagtaaaatatctattggtcttgtcctagtgaaagatacatttgaggcaagtatacactcaggtaatccattttctatgcccaacacaccgcctggctaagaccactgttaatgccataatcaccttcccacacttgaatgaaaaacttcagcactgaatttcatattttatagttggctttagttctttattgtactatggttatgctgccaataaagcatacacattctgataacaagaaatgttatcaccagtgtgctgggtgttgagaaaatacagaccttgattgaaggttcatctcaaaacagcttctgtgctctagctgtgtttcttgtttcagacgctcatcagcttcacaatccaggttaggtcctcttggtaaatctctcaaggcgcatgttcactttcaatttttacgatcgatgttataaagtaacttggagatgcaatggtagcaatgtcttttcccattctggatctttgtcattggaatagaaaatatttggaataaagatttgctcttcccactatcccataatatcttctcacaatcttatctagatgcaagctgagtgatatttacaagcatcccattttacattgtgtcccctcacctttccctgggcctggtacaaggttacttcctcattaattatcattttgctcttgaaataattaatacagatttcaacttataattggaaattttccagggaatcctctttttcttttgctactcctaatggttataaaatctgtggcattaaacacacacacacacacacacacacacactcacacactctcacacaacccaagcattcttcagaccaaattatttaaatcagtgcctctcaaccacggctgctcactagacataccagggcattttgcaacatggatggcggagttgggcctgtgcagtaggtaaggttgtgataagacatagaatatttcagataaacaacaaatgtcaaagactaaaaaaacaagattatgtcttaaggatgccgtgacatttcctggttgagaatttgaagcattcctcactcctttgtcttttgtttccttccatcctttactctcatcttctttcctttcttccttcaacaaatatttatggattgtctgctacgtacaaggaattcttaactacaacagctaattgagtgcccttgcagttcttatagactacattaggatattcaaatccattattttataagatacatttcaattttctatttgatttatgttaattattgttaaatattgagtatagagtgaaattatggaatatctttttttttttgagatggagtctcgtcctgtcacccaggctgcagtgtagtggcgcaatctcagctcactggaacctcctcctcctgggttcaagcgattctcctgcctcagcatcccgagtagctaggattacaggcacatgagaccactcctggctaattttttttttttttgtatctttttagtagagacagagtttcaccatgttggccaggttggtctcgaactcctgacctcatgatccacccaccttggcctcccgaagttgtgtgattacaggcatgagccactgcacacggcctgtggaatatctttatattggtgatctgcattcaaattattaaaaagcatgaagaaaaaatgaattccttcatttagtgtacattttcatctttgtcccattatttagaaataaggggtatctaagcctaaaacacatacagaaatacatgcttttaaccaatagacaagtacctgctgatgtagaaatagggtgatttggtgtgtgaatttattaggccactgactgcctatgctatgtattatcaattttttctgaaaatgttatatacattgaccaaataacagatgttcttctgctcttcagcatatcctagtgagactaatcctcaccggttaaatatattcataactgtaacatccagaatgtagcacttatccaatacaagtgactaatatgagtagttttgctgttggccagacactgtgaaagcgtgcattatgtaatctcatctgcctagcagtttggtgagctacgctgtgattcctgtcaagatctcaagctcggttcacctgagtccattttctttgctttttgcaccacgggaaggtactccttcagtgtttacttttgtgcaaactatacatcagaaggagaaaccattttggttttgatggtagtcatccaggacagattttttaagtttctctgaattattttcatgaatggacatttatttatttttaacaattttaacagttttattgaaatgtaattgacctaccttcaccttgtttttggtaaagaaaaaaattgtgtttttacataaacatacacccatgagcccaagatggtaacatctatcaccccccaaaaatgcttccagcccttttatagtgtcactttcttacctgtcaccaagttctcatccccagacaagcattgatatgcttttgcctcctgtattagtccgttttcacactgctataaagaactacctgagactggacaatttgtaaagaaagtaagtttaattgactctcagttctgcatggcttgggaggcctcaggaaacttacagtcacggtagaaggcaaaggagaagcaggcatgtcttatgtggtggcaggagacagagagcaaggggggaagtgccacacttaagccctcagatcttgtgagaactctctatcacgagaacagcatgggggaacatccacacttacacccttagatctcgtgagaactcaacatcaggggaacagcatggggaacatccacacttacaccatcagatctcatgaaaactcaccatcaggagaacagcgtgggggaaccagcacacttacaccatcagatctcatgagaactcactatcacaaaaacagcatgggggaactgctacacttacgctatcagatctcatgagaactcaccatcaggagaacagcacgggggaaccaccccatgatccaaacactttcaaccaggtcccttccccaacatgtagggattacaattcaacatgagatttgggtgggagcacagagccaaaccatgtcacctcctataaattaatttcattttctattttttaaataaatggcaccataaattgtttactcttgcgtctggtttccttcactcagcatcataattttgacattcatctatattgttatagtccgttcttttttattgctgagttgtcttaattttgtatatttacacacccattgatagatatttgggttttctcagttttgggttattacaagtagagcttctatgaaccactgatgtacaagtgtttatatagacatgttctcactttttgagggagtgggaaaattataggagtagaatggctaaggcatagcgttagtgtatggttatggtttttaaaaactgccaaactgttttccaaattggttgttcccttttgtcttcccgtctcctgtccaacacgtggtttgatcagtcttttacatttctggcattaaaatgaatttataccagcatttcctttttttttctttttctttttcttttgagatggagtctcactctgtcacccaggctggagtacaatggcatggtcttggctcactgcaacctccacctcctgggttcaagcgattctcccgcctcagcctcccaagtagctggtactacaggtgtggctaatttttgtatttttagtagagacggggtttcactatgttggccaggctggtctcgaactcctgacctcgtgatctgcctgcccaaccctcccaaagtgctaggattacaggcatgagccaccgcacctggcctgaaaatctttttatgggcttatttgccatccttacatcttctttagtgaattttctgttcaggtatgttgcataaatagtatcatgttgattgctttttcgagttctttatatattctgaagacacatgtgtattggatattcaattggcaaacgttttctccaagtcagtgtcctgtcttctccttgtgaagaagactgtgcagaattggtattaattttttcttaactgtttgatagaatttatcagagaagccacttgggtatgaagatgtcttatctggaaggttgtgaacatgaactcagtatctttaattatctatttgtagtttgtagtttctgaggaattggtctatttcatcttaagttgtgaatttctgtgagtgggtaccagtactcccttattatcctttcagtgtctgcagggtctccagtgacagcctcttctctgttctctgtctttttttctttgccagtcttggtagagttgtattatgttatttatttattgaaagaaaaagcttttgatgtattttctctgttgttttctgttcaaacaattagtaaatcgatttcattaatttcagctcttatcttatttccttccttcttcttcttcttaggtttatttagttcttttctttcctagtctaaaagtagaagcttagattagtgataggaaatctttcttctaatataaacatttaatgtaaacttccctctgtttgttgaaacaacacagagttgatggtgtgttcaccatggcctggagtccaggcagctttgcacccagaagtgggcattaatgcaaacagaaacagctccaggagaagcctctacttcaggctcaaggggaaggacatgaaactcctgacgctcccagtgtatgggaataccatttcttattttctacattcttccatgctccatctcaagaaatcccatagcagagggcccagagacacctaacactccgcaagagtagaaccttcctcttccatcagcagggaaatggtcctaagagagtggggtggacctctggggctgttttcctcttccagtgagcctgcagcatgacgccagatgtacatgcagtctggatgagtgcacagcagagatggaaaatgaagcccagatttcaggctggaaggcagaaaagaggagaatctaaaagtaagactgggaaaaagaagacgctgtggaaactgattctctctatatattttaacaaactcataggcttgcctccaagctgcagtggctggatcttatattattttacctacattcttttcagctcaatttatttatttgtttacacttttttttttttttggagatggagtctcgctctgtcgcccaggctgaagtagtcttgctttgtcacccaggctgaaatatggtggcacaatctcggctcactgcagcctccatctcctgggtgcaaatgattctcctgcctcagcctcccaactagctgagactacagacatgcacaaccatgcccagctaatttttgtatttttagtagagacgggattttgcgatgttggccaggatggtcttgaactcttgaactcaagtgattttcctgccttggcttcccaaaatgctgtgattacaggtgtgagccactgtgcccagcctgtatagacatttttagagcaattgcaggtacataacaggactgagctgaaggtacagagatttctcctagaccttccctttccctcaaactcacagcctccactgctctcaaaaatcccctaccagagggttaggtttactataattgacgaatttgcattgacacattattatcacacagaatctgtggtttgcatgagcatttactcctggtgctgtacactctcacgtcatttgtggaaggcatttttatgagaaaggcattttaggtcaacatatttttcttttagtatttttaaggttttactcttctgtcttgcactttttccaagaagaaagctgctgtccatcttaactttgttcttccgtacacagtatgtctttatttccatatgcttttaagattttctgtatgttactatgtttgagtaagcactttggtgtagttccttcatgcttcttgtgcttaagcttcatcaggcttcttggatctttgagtttacagcttttgtaaaatttggaaaatttttcaaatattttttctattcttttttctattgtttctcctttagaaattataatttcctgtgtattaggtatttgaagtcctctcacatatcacaatgctctgttgatatttcttagtcttttttctctatgttcatttgggagtagtttctattactatctcttcaggtccactaatcttttcttctgcagtgtttaatcttctgttcatccaattcaatgcattttttggtttaagttattgtagtttttgtttctagaagtttaatttggatcccttaaaattctgcatgtctttaggctaggtgcagtggctcacgcctgtaatcctagcattttggaaggtcagggcaggcaaattgcctgagctgagtttgagaccagcctgggcagcatggcaaaaccccatctctactaaaaatacaaaaaaaaaaaaaaaattactaggcatggtggcgcacacctgtagtaccagctattcaggaggctgaggcaggagtatggcttgaacccaggaggtagaggttgcagtgagctgagatctcatgccactgtgctccggtctgggcaacagagcaaaactctttaaaaaaaattctgcatgtctttaacatatttagtttttcttctagtatctattagtatactaattccattatctgtgtaatttctgggtcagtgttaattgattaatttttgtctttattatagattgtatatttccacttctttgcatgcctggtaatttttgaatagtaccagagttttaatttgtccagtgatgtacatttttatacttctattaatattctagagtttgatttgggatacaagtaagtcccttggaaacagtttattgtttgggggttttgcttttcagctttgtcacttggagccagagaagaatttaaccaagggccaattatatcttagtactgatgcaaaacaatcgagttttgtacgcagtgcccatgaattacacagttttttactctggcagatgggaacagcccttcttccttttgtccctgccctggggatggttccctctaatccactctggtcgtccttttctgggacttaggtagtctattcatatgcacgtactgatctgtgttctgcttatgacttgagagggagcctctgaaaatctccagaaattcctatctgtgcagctgtctcctttttgattctctgccccgaaactcttaactggttggtatccctcatctctcatctcttccactcagagagatctccagatttcactttggttcccctctctgtgtcaaagcccagaaacttccatgaagtcagctggggcagagttagggattaattcatttgttttctgtctctcagaggtcactgacttcattgtctggtgtcagataacctgagagccattgcctcctattgattgtccattttcagttgtctcaggagggagggcaaatcggagactattgctccatcatggctgcaagcagaaatctgggatttatttattttctatatgagttacctactgtatgggttttttttttttaactattaaattgctcctggaacactatgcagccataaaattgaatgaaataatgtcctttgtggcaacgtggatgcagctggaggtcattatcctaagcgaattcatgcaggaacagaaaaccaaataccatgtgttaccgcttataagcggaagctaaacattgagcacacatggacataaatatgggaacaacaagcaccgcaggctagggacacggggcatgagtggaaaaactacctatcatgtagtatgctcactatctgagggacaggatccataccccaaacctcagcatcacacagtatacccatgtcacaaacctgcacatgtacccttgtatctaaaatgaaagttaaaataaagtaaaattgaataaaataaattgcccctggggtgtcttgtgagcacctacagttcttattatggagaactttctgcaatgatggttttgtttgaacacttttatttctttatttcttttttttttttttgagttggagtctcactctgtcacccagactggagtgcagtggtgtgatctcagctcactgcaacctccacctcccgggttcaagcgattctcctgccttagcctcctgagtagctaggattacaggtgcctgccaccacagccagcaaatttttgtgtttttagtagagatggggtttcaccatgttggtcaggctggtctcaaaactcctgacctcgtgatccacccacctcagcctcccaaagtgctgggattacaggcatgagccaccatgtccagcctgaacacttgtatttcttaagataatttttgataatgtggataatatttttctatatggatagctgttttcctgctttgattatttagattatgtataccaccttttcctaaacagacatatctctgtacaaaaattaacatagagcagctggtatttcataaaatgatgatgctagacgtgagttttggataggaagtggaggcgagtcctatatttgtttgaatgtgcatggattttaattaagttaaaattaagcatactagaaattgtccaggaagctgatgacttttattctttttcttaggaatatcttgggttaggagctttaatgaccacatggtcaaaaatgcatttgtttctgtagagttctgaacagaattctgaacattctgtgcccctcttcgaaaaaaaaaaaatgctttggctcaggacaaactgccaccttctttgtccacaatagaatgtaggagttagcaggaaatcctccattcttttattgatgatctaccagtgctttaacccggagaactctgagacatgaaaaaaaattcttaagatatttaagaatttataaataatgagcatagagggatacgctttctaaaaattacctttcacttacatttctcatatattatctcaagagtttttgcagcaaccattacttgtaagtactgtgtgaccatttatcaggtcaggaatgaggcttaaaaaattaggattttagcaaatgcctctggcctttattatgtgctcttaccattcaatttcagtgatcagagaaattatacataatatcatactaacaatatttatctatttcaagcaaacaaaaacgtattgacagacttgaaagttataagtcatatgtaaacatatattttatttatatattatagataaacacacatacatagacatatatatgtgagtcttatacattctgtcctcagaattctcatacgttatttattcacttggttaaaactataaattcttcatatgaagctacagatatactttctcaacataattcattgaaatatttaaaattaagaagtcatctcaaataaaatctaacaaagtaaaatactgcatggtgcctttattctagatatttatttattgccaaaatgttctctgaagacctaaaagcttgaaaactcaaagacacctccatgaaagttatgcattagggtgaatattgagtcccacaaactacctgatgttattctacatgttgaggatacaaagatgagtaggtcatgcttaaacccactatctcaagggaaagttggggtgacagacaccccgcactgtggtgggggtcagcagagcctaggagaatagcatgatacctccagagaaaagagtacttaagtgctcccgcaggggccttgagcaacgatgagagatggacacatccaaaaatgcaaaagaggagctcccagacttagaactggacctgagcgtaagggtagttgagtttaatatgaaaaaagggatgggcatgagcagcatcttaaggtgtacaggaaaagatgccaccattgcagtggcataagaacaggtggaaaagacgagaaaatgagagaaaggtagaacctttgtattttagggtataaaacttggactttatgctgtaactaataggcattgaacatttcctgcaatgctaataacgtgattgtatttttctttaagctagatcaggggttggcaaacttcagctgacgggccaaatccactcagcagcctgttttttaaataaagtttcattgttacacgtccatacccatttgttttcatatcattttcaaagcagagttgagtgttgcaatacagactgtaggcccacaaagcctgaagcagttgctatctggctctttagagaaaatgctgacttctgagctggattgctgtgcacagagcttctcaacttggcatttgatatttgtggcctgataattcaccatcgtcgtagactgaccagtgatttatagaatattatcagcatacctagtctctattcactgaatgcaggaggagcaccccgttccccatcatgagaacaaaaacctctccagacactgccagatgcccttgaggaaggtaacatcactcctctttaagaaacacttttagcagctaagtagagtttagtttacgatggtagctgaagttaaaacagtggtaattttaatgaactgaagggctagttgtgaaaaaatatattttgaatctaaaaatataacaattataaatatggggcttaacaaaggtgaaaattgaagataacttctgaaggtctagcttaggttacaggaagagtaatgatgcccttcactgagataaataataatggaaaaaagcaggctaggtgcagtggctcatgcctttaatcccagcactttgggagactaaggcgagtggatcacttgagaccaggagttcgagaccagcctggccaacatggcaaaaccccgtctctactaaaaatatgaaaattagctgggcctggtggccctcgcctgtaatcccagctacttggaaggctgaggcaggagaatcacttgaacctgggaggcggaggttgcagtaactccatctcaaaaaagaaaaagaaaaagaaaaaaaagcaggtaccaagcagaagataatgggtttagctttagatgaagcgggttcaaggtacctgtgagatgctaaggcagaggggctctaagattatatgcgtatgaatataagaatatatattcacatatctataagacaattctggcagaagatatatatttgaatatcaccagaatatggctagtatttaaaaccagggtaataaatgaaaaccagattgcagtgttaaaaaggctaagcaagggaatataaagcttatgcaaatgagaatcaagaggttctgcagatcgggcgaggtagctcacacctgtaatcccagccctttgggaggctgaggcaggtggatcactggaagtcaggagtttgagaccagcctggccaacatggcgaaaccctgtctctactaaaaatacaaaaattagctggacgtggtggtgggcgcctgtaatcccagctactcgggaggctgaggctggataatcacttgaacctgggaggcagagtttgcagtagcctgagattgcaccactgtactccagcctgggcaaaaagagggaaactccgtctcaaaaaaaaaaaaaaaaaaaaaaaaaaaaaaagcttctgcagtagagacgatcaaaaagcaagggttattatgaattgtccattgggtctgtgagttagggaaaggtgtactgagggtgctgggtagaagaaagatgatatagattgaggcatgaatgatagtcaagaacttacgaaacataatgagaaaaagacaaaaagaaggtaaaataccaagaatcaaaagctccatgacctctaacatttactctaagtgggagtcatacttaatgctggctggatacgtttccaataatcctataggtgagcaagacacagtgtttcaatgtttataagggcaggttccttgtaaatctctcaagtgtgcagataattgcacttggtgggtggcaatcaggacagcatgagagagttttcaagggcaccagcatcataccaaatatttgcaacagtctgtcaaagagatggagtgtctaggaatgaagcttttgtgaagtcatagcttgcatctatttctattctgtaatatagatctgtggtcgtatgcagtatgtatctttctattgcaacacatatataatgcattatgtataaagacaggcttaaagttgatccattttgtcatttttactgaagttaatccactcagcagttcctgtttctaaatgtattttagatgtttaaaattgatgttaagcaaattgtcatagtcttcttttaataccatccaatctaaaagtgtagaagaagacacatctaaagaaaacctgggtacttataaatttttaaaataatccagatgaataagaggaaaagagaacgattagataacaatcatgtagggtgcagtagcctagagaagcaatgatagcattgccaattcatcctaatgactgcatctgttccctatacatggaattgatggcaccaacacaactgccgcctcctccgtgtgaaagagcaggttgatgacttgatgatgactttgacctcagagatggtgaccaggtgccaattaaagttacattgtcgataccctttaatataattagaaatgaaaataagaaatgaatggctatgaaattgcacttttaccttgacagctaatgaaacaggctgtatgccatacatcactcgtgtatatgtatttgtttaaggggatggtcactagcatcatcacatccgtgaatcattattagaatcatattaaataatacttaagtttactcactttattaagtatacatataagtaaacattgtatattaattatgttaagaaataatatttaagtaattattaaaattttttctcccacctcttctcatttctccttccttcccttccttcctttttttttattcatgcagcaatagtttgtgaatgtctggacactaaagtgtcccaaagtgtgggacactttggggataaaaatatggaatgcacaaaaaagcccctatcttcaaagccagagaaaacagaaaaatgaccatttggagtgataaagtagaaggagcccagaaaggaagcatctagaccagtcagtgtgggtttatgggtagagctttataggacatcttgcagtagctgacatggagttgagtctttaagaccacttaaaatgagcccgaaaggggtgtacacacaagcaggtgcagaagtgcagcactgagggagcatgtgagttcagcaggttcagcctgggggagagcagatcccgatggccagggagacgttgaactagggaaagacacagcaaggactgccacatgaagggtcctggtgccaaactaaaagctaggactggatgcaggaggtgaggagtcactgcaggatagtaagcaagaccacgcaacaaattaactagatagggcatgagagttgtattttggagactattgatgagagtaattgaggaagatttagttgaagttgtagagagaaaacttcattgagctgaagaaaacgacataaactttcgagatgtttaggatgtggaaggaccacaagttgatgaaccagtcttgacagagcccaggtctgcaggtagggaggcggagagagggcggacccagtggaatgggagcgaatgactggggatgtgagaggatggatggagacagcaacttgtcttgaggtctccttgggagatcgaagctgtgctatccagaaggaaattcaatacataggtgtgaaggtcaagaaagggaggattgcatttgagtacataacatttttaagtcattcattcctaaatgatagttttaaccttgaatgtgtttgtgatcgctaaagaaagacatgctgggagagccaagaagcagatgctgaggagcacatacgcttagtgggagtgtggacagaccagggtctataagggacactgacgatgtgtaaggcaggtaacagggaacaaccaagtgtggatgatagtcagtgataaggcgatttcaatgagggagaagtcaacagatccatacactatggaaacagaaatgtgtgacggagagaaactttgaaatatcgttattaaatttgacctataacatgttagctgtcttgatatgggatgctttgataaagtggggtgcccaaaactccagtctctgtttgcagcagagactagagaaaatatgttaaaacaagttcaaatgaaaaatagatttatagagatttgtattctctactgacaaaatttatctgtgctgcccaagatagacatcatttgtgctgctttggaaaggaattatttgcattgctagaagttttctatatccacagagctataaaataaccttctcacaagcaatcgaaggtcacacttctgtagaattaggtaattaccagagggcccactggacaatgcccagcattctgttcaaagcatactcccagacagtattctctgcttcactgtggtttccccagtaccaagcacgatgttgtatttgtgtttgtctcaatgggtagttatcaaaagaggtaacttccaggtagaaagcttagataggatccagcctttgagatatgtgttgtgtcaaaggcatgtgatatattagtggatattaagagatgaaccatcttatacaatattaatttctttagggttctagctaatgccaattttaatcatgactgtttttgaattttgatcttcattaccattattagtgcctatcagtgaatgataatataccttaatttccatgacatttcaaatgtcatgcatcttttcttatcatttggacctatccatccaatatttacaaatagtgaaagtaagtcatcaagatacaatatgacaatttggtgcacaaattattttccctcagaatatgtgtctgggactctgattcttaatgttgctaattacccctcactattatccagtcatctttgttatattactcaaaggcaacagatctatatttaaagcgtctcactgaaaagaaataggaagtccattatttgtattaaattgatcattctgatatgttctgaaaatgtacatatctgttgcatttcatggctcaatgtggcataatagagttaaatgacattaaaattcactgctactaatgtttaatatctcacgggccaaatgtttattttgtctttataataaatattgattggctgtatttttaaagtaatatttttccaaattagcaaacataattcagttcagatgccaaactctagctcttaattcaacccttgccacactttccgaaggaggtgtgcagaggaaagtgccttgctgtaaaaccagccatgtggtctcagcaccaggctgctcctttggagatcattgttatttcattcttaacttctcagtgatgtgctaatcaattgcactggcaatgatattctgaacagtagattcatatggtagtgagtaactcaatatctgaaataggcataaacttgtttaaatactaaaattattggcattagccacaaaactcacaacaccagccaggtgcagtggctcacgcctgtaatcccagcactttggaaggccgaggtgggctgatcagctgaggtcaggagtttgagaccagcctggccaacatgatgaaaccctgtctctactaaaaatacaaaaattagctgggcgtagtggcgggtgcctgtaatcccagctacttgggaagctgaggcaggagaatcacctgaacccaggaggtggaggttgcagtgagccgagattgtgccactgcactccagcctgggtgacaaaagtgtggtctgtctcaaacaaacgaactaaaaactccacaacgctctttagccattttcaagaacagccttctctcttcagtaagaggagaaaaacactggaataacaaatatctccaacaactaaatctacctgtttaattttctgtccctcctgaaagataggaggtcagactgaccttggtgaatatttgattaaggagcaaattgctttaggaatgggataattttacttaaacctcagagcttaaacaggtcttttatttaggcttaaacaacaaatgaacatctgttcttttcagtttaacgaaacaagctgttcttgtacctgataaatacaagccatggctcagccagtgaattataaaatgcatgaaggataaagatatcgatttgaatgtacaaaacaggctgggctcagtgtcctcctgagcatgcgtgatcaaatcagagaacagtgtggttggttcctctgcctgcgaccattatttcagctccatcgcagtctgggttctccaagagggcacagttttaaattcaatgtcccctttggtagatggttctgagtattaggtatgcacgggtgcggagtctgtgttgaaaaatatcctagggctgtatgggaagcaagtacaaacctggctaaaataaacattacgtgtgggaaaggctgctcaggagatggagcttggtgtatgtttcatgctgagacacttctaatttagtgtttcactttcatccatttcttgaataaatacaatgttgttatatggcacaactaaaatgaaacggtgggaccagctttgagtaagagaactcgagagtattgtcatgtaaattcttagcagatgctctgaattcattttttatctgcttcctggtattgcctaatcccaggagctgaagcataattcagcattcttttttttttattattcagctcccatattgtctgggaggagagaccccctggcttaatgacataaagtacatgaatgaatccctgggattaagacggtgctgcggatgcggtgcctgagaggcggcggttgcggtgaagtgagctcagcgggccgcagtccttcatgctcggcaccgccacaggctgcccttccgcatcgcgcgagaagaagacacagcgcctttagacagaagcacacagaggaggagaggccacagcagcctggccatggccagacgatggtgaacagccccgccgagggcctcaggtggtcccgcaaccgctcaggagggcgggcagcccctcactcctccaggcccgctcctttcccttcctctgggtttctgccaacggcgttgtgagagtcagaaactgagtcccgtttcagatgctgtcttagaatcttaagagattaattcctaataaatttggccataaggacattaaaatactagtaacaaaaacaaccaccgccacaatgagagagggtgggggagagggggaatatgaccctgatttagaagacttggaatttaaggcaaaagcaatcatagaatttaagagaatagcatagagtcttgccttttttgttttctgcattattattattattattattattattgtcattattattatttgagatggagtctcgccctgtcccccaggctggagtgcagtggcatgatcttgactcactgcagcctccacctcctgggttccagcgattctcctgactcagcctcctgagtagctggaattacaggtgcccgccaccatgcccagctaatttttgtatttttagtagagacggggtttcgccattttgggccaagctggtctcgaattcctgacctaaggtgatccacccgcctcagcctcccaaagtgctgggattacagacatgagccaccgcacctggctgttttctgtattactaatatgcttcatttgtacattattctgtatgttggttgtctttatcttttcaaacactaaaacaatagggaggaacatctatcatcccatctcccatattgatttagaaactacatttgactcaagatcctacagtccagattaagatgctagctttgcaataaactgactgtcttatgacataatgccttaaaatgtcattctggagttgttgtgagaagtcagtgatgatgtggaatcgtctcatatcacacctggaatttatgggcactctataaatcttcctttgttttcctgtttccctgtccctccctcccttctgtttttccctcacgctccattttcaactgcagaaagctgcatgtagaatttagggaagtcccttaccataccagtgccccagactgcaagagagacctcctggggctgcgaggcagcccttccctatggttccaaggaggctcttgagccaagaattgcatgggaaagacgtttgcagcaatgtgaagtgtcacaatgtcttcgtttgagtggtgcatttgtgttcctaaaagacgatagcagcctgttctccttagtttggaagtagaagggaaatccgtgttggccagccctagaagcagtagccctggaattgtcatagtgataatgcgaagacttcttcctcccttagcagagccatgtgcagaccatggtgagaactgagaagcctcatacgggtccctgtagatgtgaaaataaactcaagaccaaattcgaagcctcagcactcaggaggtgcaaaagccatcgcaagatatagctgaagtcccctttccatctttcttgtaaatacgcagggcggggtcatgggaactgagggagaagactggtgagctctatggctgtgcgtccacatgtctgctgacaggctccagttcaagggcacggcaagtgccagggattgtggggagatgggaggtgacgtgactggtcctgatgcagaggaccctcaggaaggggcagaatgcaagaaggggtgggcaggagtgcatggtgaaagggggccctgccctgcagtgtgggcgtgcggaggctgcaggacagcagaggagacccacagcaggacagacagaactaaactgcaatgatgggtggatatttcctgtcagaatcatgggaaggagggaaaaaatgtgcacgtgtagagaacaaaatagatttctgtgtgaactagaacgtttttgacaactttgtctctgctttcatatccttttccttaaaagaaaaaataactagtactccctccttaggggaaaagcacttctgcaatccccgcccctccccgtcccatttctctttcttatccttcccggctctccacattgaagcaggttttatatctctctcaagcccacttgtgctcctttttcttcatacttctctctgttttcttgatgtatgtcagtcttgttgctaggcagctgttatgttcaacccaccatgcagccttctgaatgctggaaattagccccaaatagcttgaaaatcacccttccgcacctgctttgtgtttactgtgagagctggaatatgaatataagttcatagaatgggggaaatgcatccatatgtagccatgggcagacagccacgtttttggtgtgcatggcaggtacagacaccatgcagtgcctcagggaaaatgcccaggagtggttctagaagaaaggggacatcctcattctatcagagctaaaattgctaaataagatgatctggtggaaaatggaaatatacaaaaataaatatgaatagaatgtagacattgtgtgtatttctacaaatgttgctgcctgcaagcttaatcggttttcccttgcctctgaaaaacaaaaagcactcattgattctatttcaccctccagctattggtcttttctttgattgatgttaagaaccaccagctgctagcatcttgatgccatcgtaatctagtgtctcccgtgtctgacgttgccattgacgccacagtcaccaaatcccacagccacctcagtgggcatctgcttctcttcctctgcagtgctcagcactggcgaccgcatttccaactttgccttcccttggctgctccaaaattggacggctcccatccagtcctttctttcctggtcctcctttcctctccccttcaccactctctttctctgccaatcctccaataggtaactcctacgatattccatttttctcctttagtttttctctttttattgattattcagtctttctggaagagcacgaggttaatggttctccccaaatattattttgttgttcacaatgaagtaattggaatataaccgtaataagataaatagtataatatcttgaaataagaaaaccgcatcttttctgaggtataattttggtccaaaaaagtcttgctttatatttgaccatgtgcagtaaaattagaatattgctttacacatcttagtgatcttggcatttcttggcagattatgtttctcttagtaagtgttcaataaatacttctcaagtagaattaaatttctaaggggtttcaggacactgaaacaacataagttttactttcataacaaaattttccttgagaatgaagcggtaaagccaatatttaacaaacaaagacattttcagagaaactgcatctgaggttaataaacattagcttgaaaaacatacagtatattttctaagaaaatgattctcctacttcctgatagtctttttttaagtagtcaattaaaattcactatgttttaaaatcaacctaaatgcccatcagtgacagattggataaagaaaatgtggtacatatatgccatggaatactatgcagccataaaaaagaatgaggtcatgtcgtttgtggaacatggatggagctggaagccgttatccttagcaaaccaacagaggaacagaaaaccaaatactgcgtgttctcacttataagtgggagttaaatgataagaactcatgaacacagagaagggaaccacagacacttgagggagaaaggtgggaagagggagaggaacagaaaagataactattgggtactgggcttaatagctgggtgatgaaataataggtacaacaaaccccctgacacatgtttacctatgtaacaaaccttcacatgtacccccaaatctaaaataaaagttaaaaaaagtcaccattttaatctgaatcctgtggtgactgcataagctgtttttatctctaggtccatgatacataggatgtcaaagttctgctttatactggaaggaacaatcacttttgaagagagaacactatttcatcactttccttgggttctttacaccttttactagttagatattctctgcctcttcaatttcagcctgttcttttaaaaatacagactccaaaatgaagactatctatgatgtggctctttcacttataattttgtaagatactatgatttctgttttttttagtgttatagtcacaatacgtgaatgtatggaagcgtgtttttatgcttgagtccttgatgttgagaatgtacttgacgaatgggactcatgttagataaattttcatttaactatgatagaacttttttgaaaccccacacttagtatacactgccaacttaggatgcagactgacaagaagaaggggaagttgaaagtggtcagaaacccatcacaagaaaagtgaggcaaatggagcgtctaacataacacagcttgaggttggaaccccatgagggcatgagcattccgcaccatcacagaagctgcatccatttcccaaatgctcagtactgccctgtccagtcagacagaggtgtatggcagtaaagagaccagccacagataagtaattggcaaccagcaaggtaataaatctagtgtgggggactggctgacgtttggtcaatgtctccttccgaagctccacccaaatttctcctttttgcttctcagtcacagtatttccctcctgttaaatagcattagtctggggaataaatgctcttccctgtctactacactgtgggaaacgtcagccacagcctccagtttgttaggtcaaaaaccttgaagtcatcctctcttcctgtcgtagccacgttcatccattcaccagaaaatcctgctgggcctacccaaatatgtagagagcccagcacgtttttacctcttccgtcgccattgccttggaccaatgcctctcacctggactataggaaggtcctccagatggcagccctgactctttcctgcccctctccagccgcactcagcctcacagtatcgatgatgattttcttcacagtcaaggaacagagctcctgggctggaacctcacacccaggaatcagggtctgagctgaggtcctgacagtcacctacaggattctgagccttaccccattgcactaacctttcgaaactcatctcctacaactttcctctcccttcctcttctccagccacactcgactccttgatattcccagagcagccatgcaccacccccactccaccgggactacagttcccccagagaagccacagcttcctccctcattgtcaggtgtctgctcacagtgaaagctttcctgctttatctttctccacatttctcattttatttgacacacttccttatttactttatttttttaagagttggggtttctgtcatccaggctggagtacaatggtgtgatcatagctcactgcaacctcaacttcctgggctcaatccatcctcctgcctcagcctcctgagtggctggcaatataggtttgtgccaccatgtctgcttaatttttaaaatttttgtagagatggggtcttgctgtgttcctcagattggtctcatactcttggcctcaagccatcctcctgccttaacctcccaagttgctaggacaacaggcgtgagccactgttcccagcccttatttacttttctttaaattattattattatactttaagctctgggatacatgtgcaaaacgtacaggtttgttacgtaggtatacacatgccatggttgtttgttgcacctatcaacctgtcatctacattaggtatttcttctaatgctatccctcccctagcccccaaccccttgacaggccccagtgtgttctcattgttcaactcctacttatgagtgagaacatgtggtgtttggttttctgttcctttgttagtttgctgagaatgatggtttccagcttcatccatgtctctgcaaaggacatgaattcatgcttttgttacggctgcatagtattccatggtgtatatgtgccacattttctttattcagactatcactgatgggcatttgggttggttccaagattgctttttaattctagctctctctaccataaagggctttggctgctattccctgctacattcccagcacctaggagcatccccagcacagactttgtgctcagtcaatactggtgaattgattgattgatcctgagtaagtgaaccacaaaccctgattctagatatgaaagtagataacagttgttcccctcatcccaaaccaggataagacaggaagagcaggctgtctggaaaggctcatgtttactttttacagtccattggtttgcctcagacacagagcaagtgaagcctaaatataggtgtcttcagtggattgaggcgacctgtgtgtcttggatgacagacgctgggacagtgtggggagtgagagtggataagtccctctccagttgctcctgtgctccggactcacgtcctgctccaggcttgcaaaccgtgtggcctcagatcaaagttactgggggaacgtgttttagctcaggaatggaatgtgaccctgtttttctatcctgtgacaccacctatagaaaacactcatattccaaaagacaagatgttttacataacactaacatagagtatgtcatcctgtctgaggtgatctttttctttagttgaaatgtcagaattataccattttaagtgtcaaaaaaatatttaaaatgagaaaaaagcatcaggtgcatgatttttcattctgacttgttaatactatattcagatgctcgaattatatcaattaaattcttggttataattaacaaatttccagaatgagacaattatgagagagaattaaaaaaataacttgagtgatttcatttcagtgtattactctggctaaatgttagaaacacatggctttcctgagggcatgaatgagttcactgttaaagagcctgcaggcaccgaaggccaacaaaccaagacttcttattcctacatgtccaatatcatagtggttactgttgagttttactttttcagtttttaagggtaaatcttatccttttccactctagaaccatctaggattaggacttgttagttgtcatcaaaactgtagcaacggcgatgaagagcttggccctggagttagattgtcctgggttcaattccagctcagccactttcctcatctgtgtcagcttcccagagctgctgtaaccaagtactacaaactccatggcttaaagcagtaggcatttcctctcccagctctggaagtgagaagttcaacactgagtctcagcagggcttcctctgaaactctgggtggcatccgctcttgcctcttcctggtctctggtggcagccatagatcctcagtgttccttggcttgcagctgtgtcactgacacctctgcctgcatcacgtggccctctgctctgtgtctcccgtggcgtttcccttttcttttcaggacatgagtcatattggattaggccctaccctaatgatctcgccttaacttgagtactctccaaagaccctaaacatcacattcacttatctttggcggggggacacagttcagcccataacagcatccctgtgaacttgtgtaagtgaatgaatgtctacaaccattatctgtctcactatcaaaagacgattgtcatccaggcctgtgtctgtgaggaggatgtgaggtgatatgaaaagccctttgcattcattcagggctcaagaaatgcgacttaccatctcctgctccacagccccatttcttggctatcagttatttaaacttgctacattcgaaggcaagctaggagacaccataaaatgtacaaagctcgcccttactctgggcgagctcacacactttgaggagaggtcagagtttgtaacacagaatagaatttatgtcttgtccggagaaacgcaaacaggcagctctgagggagggtagagcgttgcttgttaggtgacttgccaagggcatcatagcaaactggttacaaagtgggacctaaatctcagttttcagattcccaattcagtttctttcccatttgaacacattgtacagttatatcacttgtcaccttttaaccactcagacattatcaaacctaacccatgtttgttcataagaggtactgatgtcagctgggcacagtggctcacacctgtaatcccagcactttgggaggccaaggcgggtggatcacctgaggtcagcagttcgagactagcctggccaacatgtgaaaccctgtctctactaaaaatacagaaattagttgggcgtggtggcgggcaccattaatcccatctactcaggaggctgaggcaggaaaattgtttgaacccaggaggcagaggttgcggtcagccgagatcacaccattgcactccagcctgggcaacaagagtgaaactctgttcactgaggtactgatatcatgtgagagaatcattaggggatgcccataaccttctgggtggtccacatgcactgccctttgcacagcttactcccggttcccaaccctctacatatcccccatcatacccatttgccctgctctgttgtacaggggaaattccctttcttcttctgcagaaaccccaataaaaattaataaagtaaaataaaataaaacacacagctaccaacttcagtacacggcgtgtaagaaatcacattcttgtcacctatcaaaagcaaaacaattcctgaatacttcacccatcagcaaatcactgaagtccatttagtgtgagtaaaataatgagccacctttttcatatccttgcctctggcactgcaaattcagtctcagttacttcagcctcagtctctgttacttaccattttttgtatttttatgctttcctatacactaagtttgaaacatgagcaaaaatccatctatgagaagaaagggtggttgctgatactgataaattcattctggtttttggctagcaagatgatgaggattctcaatccaggaaaagtcatacactgacttttcagtgagaatgctgaggatttaagaaaggaaataagaaatgtcttcagctgagaaggtaactgggtactgtcttggtcagttcaatctgctttcccaaattaccatagactgtgtggctcatgagcaacagaaagttctcatagtcctggagggtggaaagtccgagatcaaattgtcagcaaattcagtattcagtggaagctcgcctcctggtttggagagagaaccttcttgttctctctatgaactgtgttctcacatggtgttaggttagtgcaaaagtaattgcggttcaggcgtgaatattaaatcattataactagaatcaaacacatctttattaatcaaaataggaaccattacaatgaacacatttttgccaatgagaagtaagttttgtttatccctgtagtgtaaaattctgtgctttgagaatcgacaaactcttggatagcattttctgcatcccgccacttgcagaagcattttccctgcaaaaagttgtcgaggtgcttaaagaggtggtagatggttggcaaggggtcaggtgaatatggtggatgaggcaaaacttcatagcccaagtctttccactttggttgtgtgacgtgtggttgggcgttgtcatggagaagaattgggcccttcctgttgaccaataccggctgcaggcgttgtagttttccgtgcatctcatcgatttgctgagcatacttctcagatgtaatggtttcgctgggattcagaaagctgtagtggatcagaccagcagcagatcatcaaacagtgacatgacctcttttttggtgcaaatttggctttaggaagtgctttggagctgcttcttggtccaaccactgagctggtcatcactggttgtcatataaaatccacttttgtcatacatcataatctgatccagaaacggttcattgttgttgcatagaataagagaaaataatactttgaaactacatttttttaattctcacttagttcatgagtcacccacttatcaagctttttcaccattccaattttcttcaaatgtcaaacgaccctagaatgttcgaccttgagttctttggcaacttctcatgtagttgtaagacgatcagcttcgatgactgctctcagttggtcattgtcaacttccaatggtcagccactgcactcctcatcttcaaggctctcgtctctttagcaaaacgtcttgaaccaccactgcactgtatgttcattagcagctcctgagccaaatgcattgttggtgttgtgagttgcctctgctcttttgtgacccatttggaacccaaataagaaaatcgctcaaatttgctttttatctaacattattctcataggctaaaataaatataaaataaacagcaagtaataagtcattcgcaaaaaacataaagcaagaaatgcacactaacatgatgtatagcataaccacatttatttaagaatgtattccaatatcaaacggcaaatttcaacaatgcgaaaaccacaattacatttacactgacctaataggaaggaataagtctgttctcttcagcctcctctaagcgcactaatcccattcatgaaagctccaccctcatgacttaatcacctgtcaaaggccccacctcttaatatcatcatattgggggttaggatttgaacgtagggaccttgagatacattctatccatggcaggtgtgtttcccagcctatgttacacaccagactgtactgccgcacatgtgagccctcgtttacccacagtacctgccaaaataagacacacgtgtgattcccatgtggctgtccatgagacatgtcccatactcccactacttgctctgaggaaagcaagtaaataaagatgtgtaggcaaaacactccctcccttaattgcactaaggaaactgaataaactcattttagaagataccaaatttactgcagtgaactttagatgaaacactaaggtattaaacagaaaataacagaaaactgatgacttcagctttggcattgcgtttccttcggcttgcggaacagccgaacatgagaatcataaacacagaaggcaacaggatgcaactgcatagatctttgctcatttcctttctggttttctcctcttcctcctcctccattgcaaccttgcctgtatctcaggttaaccactgtaagtgcaaagggaattttacatagattttttttaaatggatgatgtaattttaaaagtcatttttgaaaaacctgtaggaaactattatattgccatgaatttcagctagggaatgaaagtcaattgctcactgatactttacaaaataaaaatgtcccagaatatttgaaatattcgatatataatatatggggaagaagcgattctacctctcaaataagtattctgaatggacgttttggtattccattattatggactctagttacatctgaattcacgcttaagtggccataaagaatgctcaaatttcttaagaggtatgtttttaaagagcatgccaaatgtttaaaaatggctactggattaattttcattcctttcaaatttcctttggttaaatggtttgaagtgcttcatgacagtgctaaacatatattagaggactgaaaaatatatttgacgcgttgtaaaaaccatttcccttataaaagataaggattctttccagttccctagtaaatgcacaatggacaggtatttggctgttcctgggataaagaaagacggggaaacttttgggaaacgatgtaacaaagacagccctgttgaatgtgatcatgtgcttggcaaatgcagtcattgctttctgtctctgctgcttttcacaggtataagccactggctgatacattcctgcgtgagaagaaggaacagtcagctgccgagcgatgtcgacttgttctccagcagtgtaaattacaaggctggcaggttggtgacctacaagctatgaaaataacattttaggattttaaataaatgagctgagtcattgcagggagccaccagaatcttcctggcaaaaacaaattcctttgatgtgtttggcaaggcgtgacattaagtgtattccctggaaatttgtcattctttatgacttaccgattttaacatcttgcagccaacatgagaggaaatctaacaggctccctttacaacgtgacagaagcttatgagccccattctgtttgcccgtgtgtcagattcataccttgtcagtaaagcattttgtcatatttacccatagcaggagtcagaggagccaaaattgaagaactaaggttgatttctttgtgcagagttggtctctcataagtgcatgttcaacctggacttccccagctcgttcacgtctcagtcagctcccctttttttctgtttctctttgccctgcttctcacctgccatacagtgaaaatgtcaccatcctttgaagcccatttgttggcaaaagcttcataattggaaacactttattatagtctgtgatccatttgaatggtagaccctaggggccaatgaaagctacagctagacttgcagaaaaagaaaataacctgagacaaaattacaggcaaatgtttaccagaaacaggagaagatggttccagattttgtaaataccttcaacaacatcagagtccatccttgactcattttaggaagtagaggtttgaagtgagaagggcagattagagcaacaatgggaaaccacgcagtccatgacaccagaaattatttggaagtttcttgctgtaaaaccaccaaaagtgcataggtggcaaaaacaaatggtagctaaaagctttgataaaaatatgacgattactggaaagtagacataaattgcatctttaaaaagtgatagggagaatatctatgagtaaaaatatatgataattgatgagtcaaaggatggggacttggctttagaaatgacatgagctgatgattcagaattgctgaataggtccaaaagtggcccagtctaagtaaaacagggagggaagactggattgacactcgcacactcatctgtctatgacaaagaacaaagaacctagaattttggcattgatgagtaatgatttaattgtctgtgccacccaatctttttctttgttatcttttttccttttcttttttttttaactaataatgaaatttgaactttaaataacaatctgaaggaggaagcttactcagtctgaagttgtcagtgatgcacatcagtgccaaaagattggataaaaagggaaggaggaagaaggaggaattactaaccaaaagtgatgtctgccaacccctccagagtcagtgacataggggtgggattcacatatatcagcatttattctgtctataggtaactgaagtcagttcaatggaatcattactgagattttgaataagtaattatatagtagtagtccacggatgatgtaacactaagatattcttattgtattattttgcttttaaagactacttacagataatgatatacatatatgtatatgtatgtgtatatatgtatatgtgtgtgtgtgtatatatatatatctgtgagatagatgtatgtgtatgagggagagagagagggagaatttttatttgtagaagaaagcaagggaatctgtaataattatttcactaagagagtgattggcagtaaccacaatatctgagcagtggtccctctgatagaccactgtaaagtacaggtcaaatatgagaggagaccagaagacaaattggtaagccctgccagccatcatttcttctatattggtgcttttgctaggattgcagctgaggatagcattaaattgaaacatacattgggactttcaacaagagcattaaaatttattttaaatgggaaagggatcccatttcatggcactaatctattttctccacacttttcacctgcctaaaagaagctgaaaacacaagacaaaaaaattaaaaggaaagagaaataaatgtgctcattcactgagtatatttgcttatgagttccctgttgtctagtcagaaaagacagtatttcttcagcttcttcaagatgtaacctatgatatactttatactaccagacaaataatcaacttcacagaaatgaagcatattcatacttcacttttatattggtctgacaaaggaaaaaaagcttttgttaaaaaataaataaataaaacaaaaaacactcattcctaacctggaaagttagactcctcagtttcaaaagcaaagcattttttagatatgtgttgctaattacagaaagaattcctcctagtcaattctgtttttaattaatacagggattcaatcagaagctgttaggctgcagggacaacaaggttgtatcggatggttattctatctgtagcattatttccaaattgctaagagttataatgtgtgttttcattaaccagtcagttcatcctttagtcctgagtggttagcatgaaatgaatggttactcttttccatatttttaaaagcagtgctggaggacagaagtgattagaattatattttgctgtgttaagtggtatacagtgttagctagaaattcatttcttttaactgaaaatagtaatttcgttgtcattctaatgcgtcttggagatctggcaggttttctcttctctctttaactttaatcagaccctgtagaaggaaagccttgaatcatcaatatgagatggtaactctgtaattcttatactctccaacattgtagcaattcagtaagccttggtgcacatttgatttccttctgtttcagatgaggatagagatgtggtatcttcagtactattacttttgtatgccgatctatgcacctgtgtctgcttttcatgctttaggtagtcacaggtttgtagtcgcacatgaggtactggaatttttagtatttaataaaaaataattcctctcatctacagagtatattacaactattcatagtttttattttattttatttgagcctaataactctatgcagaaaaggaaagtagacagcacgtacaggagtgaccttattttagatttgaggtaatggaacgtcacagagagcccttgtcttaattagagatcagtgtactgatcaaaatactaggtgcagttaatattcagtttcagtgggagtgccactttgctgagaccaacgtctagcttttcctatgtcatgttctttccactgcatttaactcaatctgtatcttctaatataactatctgaagtcattttgctcatattacaggacttggaaggggtagattatgcatcacagtacaagctttgatcaaaggcacttataccgtttattcatctgagcagcctgccccttgtacagtgtcttttttatgtttataattcacccagcaaatgaaggaaaaacaagcagactacttcccattacagggtgactctgatcagaatccttttcaacccaaactgtcaatcaaactgaccctgaaatagcacaatgcctttgcacctcattcccaactacatcttggaaacaagaggagaaggaaaaggaggagtaaggaaaggagacgatagagaaggagaagaactggaatcaagtgaagagtctcaggaagcatttgatgtcaattctaattctgagggttaagacctagatgtgactcaggccatccagaggaaaggacaggggtgggggcaactcataggcggtgctggtggaaatgcatgtcaaaggagcatcgctgcaccttcgcagctagagcaaaggcagtttgaaaacagtttattaggctattccgcagatccacacagtttacagtataccgagttttgctcacgtgccaattctcagcgagacattccctggctactagattttaaattctcactatcctcgaccttcgtactgcatcttctcatcctcttctctgctttgttctcctccatggtgcctgggaccttctgttacgcttcagattgcagtccttaacatgctgttcaccacctttcctccatagcgtgggaactccatcacgagggctttgtgtctgcagcttactgctgcatccccagcatagaagccagagaaagacacaggacagacactctgtgcctggatgctgggccaagaaatgagtttctgtaaataagaaactaccaaacaatacagtacacttgatgtggatgcaaagacatgtaagaatttttacaggctgggcgcagtggctcacgcctataatcccagcactttgagaggctgaggcgagtgtatcacctgggatcaggagttcaagaccagtctggccaacatggtgaaaccctgtctctactaaaaatacaaaaaaatagccagggatggtcgtgggcgcctgtaattccagctacttggtaggctgaggcaggagaattacttgaacctgggaggtggacgttgtagtgagcagagattgtgccattgcactccagcctggacaacaagagtgaaactccatctcaaaacaaacaaacaaaaaactttttaaaatttattgttttgaaatgaaataagaatccaatggatttttagctttatatctacgtgtataagatacatgtattaatgcattaattctataattaaaaataattttaaaattttgaaactactacataaatgtaattttagcatagaatactatatagggtcaaattaattattttaaacatttgtgagaaagctgtaagtcacactgcattttgcaccaaaacatttttgtgttccaatatataatttctgttgtgtcttttataccactagactgtacttctcaaaggaatcttgtgccctttttcatagaatttgaactggtcaccataagttttggcaaagtcatacatgttgctgtttccttaacatactcaaaattgctacttttacataatgtggtttgattttgaagaaaggaaaatcaggatgtagtggtggctagaagggaatctttcacgttggtggcttcttatgtttacagtgaaatgacatattttaaaaacatggtggactagtcagagccacatccttatttgcaaagtgggatttatgtaacttgtttgcaaaaaggaatggaagtattttgaaatgatttgagtaagacctgcatgactaacttctagtgctgttttctgtcgcagcagatatagttttctttatgaaacgaagagttcatggattacctcactatggaaaaatatccaaatagtttgaattaattcctggtttgaaaacaagttaaattaagccagtagttattaaccatctgctatttgtttcattattgttattattcaggtattttccttatctgaacatatgcattttaaattcagtgctatcttaaggtaacttggaaaggatccctctggaactgtgtatagttaatcaaagactatttgcccgaatttctccaagccacagaagagtgactggacagcagttaggcccctgtggaacatgcttgtttttcatgttatatcatttatgtaaaatgaaaacctctgaagctaattctaagtggaaaaataagtggtataatctgattttcacacattttatatgcatcaactggttataggatgatttcttctgtgtagttatttgaatgctatattcattttaaagccatctggagggatgacgaatgaagaaacaaatctgtcagagtcggtccatgtgataccaggggtgctgcttcggaacacaggcactcacacagcactgggagagtcgagaggggcactgcaccgatgtggctctgtgcagaaaggctttcccagtggtacttttcactgatagttcaagaagatgtcgagaacttcggggtgaaagaagttttgtgggtaggcaaagaagagtggcctgtgtgtcccgtttgaggcaggaacttgtgatacctgtttctggaaattgtggaaggagaagttgagatcttaaccttagagataacatatcgtctatgattttaaggatgaggagtcagacacacagatccttctggtggcttactcaagattataatacagacaggaagaaagaaacaaaattagaacaccaacttcatcccaagtaccggcatgatacgatacttactctagtgtgtgtgcatgcgtgtatgtaaaagagacagagagagaggctctgaaagaaataacaaagggtactcaacaaaaaacatactccaaattgtaatgagatatacttttcctatttgtgtttacttgtgaacaaagaaattcacaatctttgtttttatcacaatcttctaatgtaatgtttacggaatagtctagattttattacccaaatagtttgaaataagtcatagtttgaaaatgagttaaattaagttatgatctttgaaggatttgctcttatattgccaagaactgcaacattaacattttaccataacattacataaaatcagttggatgaaggttttattatttcattaatctgcagtagtacagtagagaaaataaaatagaagagcaaggaactgttaaagttttaactacctctcactttttttacattctctatgatgagacaattgtattagggcccttacttcttattagtacgataaattaatggtttataacctttgttttactactcagggaacacttcataaatcaactataattacaagctagaaaatagcctataaaatgattctttcttctgtatcctttctccttctctggaattataaatgttgaaaataataagcattaggaacctaagagtacaccttgaaactatgtacattctgtttggaatcaccatatatattcatattatattatattatattatattatattatatgtgtgtgtgtctgtgtgtgtgtatttcctttcttcttttgtgccaaacacatgcatacacacacgccatatacatatatgacacatttttgttataaaagtagtatgtatccttgataggaaatttgaaaaagaaaaaaactgaggaagaaaatacaatctaccagaattgaactacctaaagataactactgaaaatatttggtgcgtattcattcactttgtttttaaaaatgatattacatgtatttgatccttactcagtgtgtctttctctctttccacacttaacttcctgaggacaggtgtcatgtcgccgtgttcttttgtatttttacatgtgtgcacatgtgtgtgtttcactatgacatctcttacagggtctggcacatagtgtgtatgaaacttgtgtttgttgaatgaatgaatgaataaatgaacctcctactgatgaccacatcttccctttgcaaatgaaggtatctgcagtgcgtttgggtgatatgtgtgatagtttctgcctttagagtaattttacattttttcactcagcttcattatgcatgaagagtaatatcttagagtactatctggcacctactaattgctgattaaaactgactaggcctatgcctaatccaactttgattgcttagaaatccatctgttttcctctacttcaagtttattgattgactgattcaacaagcatttactgatcaccatatgagttcccccaaattaggcaaggcaattgcgatggctcacagtctgctgggggagaaacagtcagctttaaactaataaataatcacaggttaggatccaggtgcaaagagagcaaatgggacactgcagtagtgaactggagggttcctgacctagacagggcagttgtcatgcagggcatttctgggagggtcacatgcaggcccagatctgaagggtgagaaggagctggggacgtgctgaggcaggaccaaggggcccagggtgaggggcccgagtgtgctgagcccccgaggtgaggacatcctgggagaactgacaggagagtaggagggctggggacagaaccagatgagaacgggagacagggatgctacaaagccatgtttctcaacctttatgttttcattattgccccactaaggagaaaaactgagagaattaataaagaattgagttctggggaggcaaaaataactttgctattacaacagtttctgaccttcaaagctcagtcctgctggataatatgaggcccctaacaactactgaaagaggggtgtttgtgtctgttcctactgagagatccaactccatatcttctatgtcaatataaatttccccaacttcaagattatttagtcattcgataagcatttactgagcacgtattatatgccagaagccttgtaattactaacacgtttttcttctcaagaaccagttgtacccactggacaggatcaccacaaggagaaggtgtgtttagagctaaatgggtcggaaccagtgggactttatgtgtcaaagtgcagcattctattttaggttcaatgcatgctactgataagttttagagagggtagaacatgacctgatttatgctttaaatgtaaaaaagtggtattagagagcaagaacagagctgggaaacgagttcccaagccaatgtggcagctcaagcaagagagagccatggtggatgggacaagggaggaagccgagaacacgaagggaggggagaggacctcaccgtggcaacaatgaaggtgcttgttaagttacattgacctgaaggtggaatcttttttaaaaccaaaatattaatgtagatcaggaatatactcaagctcttttaaaaaacgaacttgctccataaaatatgtttggagctctagatgatggaaaagactcggccctttagggctgaaaacagaagacagttcacaaaattagatgggattctcaaagcaaacgtgagcacaccacaggacagacatatgcagaattaggaaagcaatgccagaacttctgaatagctacaaatagtcctaaagatgcactacataagatcagatgtgcaggataaaaaaccatggtatcatgtttttagaagaaaagcacacatcaaaatatgtaaatgccatcaacttggcagatgacaataggacaagggctcccacaccccagggagtgccaaaggccatgaccatgtttgtgttactgtttggccatttatgacatacagtcccatggggcaaaccattattgacatgatgtaggccattttgttaaaaagaaagatcaaatgtgtgctctgactgaatatattaacttatcaaatacattttcctctgtgcttttgaagctaattacctttgtttgggtgtggctttggtatgctttttcacaatgtgtctctttgggagaagtgattttctttaagcactcttgaccatatcaatatgatttccataatgaaataacgtatagaattacatagtgagtcattcactagtaagctcaaaatagtaacttttattcatcactgcctgctatgcaggtcatactgttctaggtaagaataattaatttttcttaaactataattatatgtaattcaagccaaaccaccttcttcaaataccagaagatacagtgctctattagatgtgtgtggctgtaattatcttttctgtgttgaagttaaacttcaggaatagtctatttataacaaagagaacatgtattttcatataaatgtatcctttgagaacgtttaaaagtacattcagacattcagagccaggctgaacattagaatttttctatttagtagcttttcaaagcaaccatgaaaatgtagagtgtggaggtattaatagtaaaatattcacacacaaaaaagtaatggtcattcttagaaatttaacgaatgaaatgggggaaatgtgaattcagcctggagaggatgcctttagttcaatggtttctttactgagcttgttgaaaggatagacaatattctactcatccttgtggtcccagcatctgtgccctgctggtatgaagaaggtgcttggcaaacatttgatttacgaatggatacatgaatgaatgaatgaaggtgaatgaatgaatgaactaatgagtgaatggatgttcagagcagacagatggtaggatgacggatgaacaaatgtgagaaaaggaacatcaggaaaaatataaatataatgcaactgagtgttatgagaaaatgatattgatccaggaatgaattataggtaaaggccttttcatggcacacatgtagaaatgttgggattttgagatttgtttcccttggaagagatgacctggtaggcacagaaactgtttcacatagcaaaaatagaacagggttgtgaaggagcacaatgacattctgagatcagcaggaaggaaagcaaatctgaggggagaactctgcagacatcagaacacatgaaaagattgtgttgttcatatcaccatcaataaagctattcttaacaaactgggaacagatttacattgctgggcactttaaaaaatactagggcatttttccagaatactgatatgtgaaagatgtgactacttttgatgcaactacgatagtacatatcctttgaaaaagctggaagtatttactagactagggctgtttttagagcaagaggggttaacatttttaaagattaattttgtatgaaaatgaagcattttaattgcagaaaagaagctagcattcacagtaagacctttctcattaaaatataatctatgttaataaaatattccaatgattgtagacttttttttttttttgagacggagtcttgctctgttgcccaggctggagtgcagtggcacaatctcagctcactgcaacctccgcctcccaggttcaagcaattctcctgcctcagcctcccaagtagctgggactacaggcacgtgccaccacgcccggctaattttttgtatttttagtagagacagggtttcaccatgttagccaggatggtctcaatctcctgacctcatgatccacccacctcggcctcccaaagtgctgggattacaggcatgagcctccatgcccggccgattgtagacttaaaaataaagggatagcatctaacccaatcctgacaacagtaatgatattattcagtgaaaactccattcataagaatgctatgggccctgtacaatatataaagaaggttcacattggttttctgcttcaggagagtatacgggaagctaaaataatagtaaatagcatctcttttagagaaataaaaaagggttagctcatattatggagggctttataggcaacataaaatcattgaagtttctagaagaccaataaattgaagtcagtgtgcaaggtgagttaaaaagcagataaaggagagatgatgagttaaattctagattttagtcggtaataatcctatatcagaggtgatggcactggaaatatgaaactcagcatctttgtttctttaatcctattagatgtattttaataaaataaatcaaatagtttaaataagttgaaaatatttaagatttaatttttgatggccgggcatggtggctcatgcctataatcctagcactttgggaggccgaggcaggtggttcacctggggtcaggagttcgagaccagcctgaccaacatggagaaaccctgtttccactaaaaatacaaaattagccaggcacggtggcgcatgcctgtaatcccagctactcaggaggctgaagcaggagaattgcttgaacctgggagaaggaggttgtggtgagccgagatcatgccattgcactccagcctgggcgaaactctgccaaaaaaaaaataatttttgtagacaaatgaaattttaaatatctgaggtcatgttatagcaagtgcttattcaaagcattttttaaaattctgccttctccattgtacacatccatttactttcatttccttcaccttaatacatgtgaattatgagctttatacttttccaacattatctgagcttataaatatctcacagttaagttgaatagtcagacagatacacaaataagaagaaaaccaggacttcagtgctactgtagagatgtatacaaggtacactagtgacatggatgtactactgtaattgatttattattataagatacacactaaacaggagaaaaatgaattcccactttggatcagaaagcaatatgatatagttggagagtaagtaagcttgaatgtattgaataagttctagaagcctactatacaacatttcactgctatttaacaacactgcattatatgcttaaaattttattaagaggctagatatcaggctaagtgttcttaccgcaaattttagagggaaggtgagggagggagggatggagagaggaagaaggaagggaggaaggaaggaaaagaaggaagagagggaggaagggagggaggagactaaaagggccatacaataaaaaagtctaataaacctttcaaaggcatttgaacatcatcctgaaaatcattacaggccactaaataattttagacaagaaaggaacataatgagattgatatttagaaagatcacgctgaatatagtttaaaaaatggacgcatgtagacccatgataatttatggagctactgaaattattcatagaagtaaacaggaagtgggttctagaaacctcaatagaacttatgactaaatggggactgggagaaaagctgtaaacatacttaggtgatgcttggggttctggcttgggtgatgaggtgatgacgactccattagcctagaaaggcaagagtgggtagggatggatgagatgggaaagtgtgggagaaatgacctgtggaaatctttagggcttgaggtgctcagggaacacccaggtagatggtccttttggtcactgagctagagaatccaggataagatggaaacatatgagtgaggctagggtgcctatgaaacatcgacataaatgtgtgcacaaggagatgggctccataggtatggactcggggataagatgagctctcacgagcagtctgtattgaaagcttttggaataatgaacttaccaggaagatgatgaaaagtaagaggagaattcagtgaagaactctgaggatagctaacttttcactggggagcagcaacatagcagctttggacaaacattggaacagagatgacagacacacagagcaggggaccaggtgagcttgtcaaagaagttaagcttcaagaaaagagagtgacccagggtcttactcctgaaaatgtggtccacagaccaccgtcaccgacatcatttaggaatgtgttagaaatgcagaatgaatcactggccccatcccaacccactggaacagaatctacattttgacaagatcccaagcgattaatatgcatttttcagtttgagactttataggatcaagggtgtgtgcttcttttagtctggagcctagagagctccgattcatcttatctctggcactaactttctgtgtggactgtgtgaatgtcatacgtcctctctaaaacatacctttttctcttgaaaactgaagaggttgatcaagatgatttctgagatctaactagaacagtgtgggttatgggcactctgtttctttgcacctcctttgtagattattaatcctactagtgtagtctattgtggatatcacaagtgcacatttccttagaggaaattgtactattattccgaaataaattctatccaattttctatgtctccataagtaactgaagtgttttatgttgttttaattgacgtgtccttcttctgtcaaagcagaaccatgtgacctgagctttctcctttactttacctgcatgggaaacaattactgattgtattttttagtagcagtaaatgagtaaactaaattaagtgacacatacaatacaaataatatatgcctcttcaactcccaaagaatgcatagatataacaaaatgagaggcgtcactatttttctaaactaccaatatgtaagaagagttctacattagatgtttttctcaatttcattaatatagagagaaatgtgcatcatagaaaaatatcaaaggataatagctatatttttcctttgtaaatgctatttcaaaagtactgccagaaacactcagcactcctaaaaattgtcttttaaaaaaaaagaagtgctctacaggttcccttgaagtctctactaacacagcttccgtgccacctacactctagcacaaccaccgttccagcatttgtctgtacctccacagcctacacctctcaaaaaaaaaaaaaaaaaaaaaaaaaaaacacctaaaaattgtaacagtaattggagctttggaagtcatcaatgacaattttgtttaatcttttaaaatctgtcacctaacaagaaaaaaaacctaatggttttctaataaaaatagcgatgactgtaattcacagatggtttacttttacaggagtcagaatgacattaacattttaatctcagctaggaacactctgcatctagcagtgcacagggagagggctcagttggagaacattttaacctctccttttctctgctagtgagaaacattctttgatgtgagaatgccaccaaaatgaaaaacgtaggtgatctgaacctttggtctaattttaatgaatcttaatttattggatttgatataacactgtaagactgattatacagtaacattcattccacaggaaaaaaaaatcaaaaatggtcaataattttctttcggtcaatgtcattaatagacaatgtaaatccatgaaaattcagaatatatgtgatcttatctttgtttcctgctaaagaaggattcttaaatttgtatcttcattaatccctagcatcagtgaaagtagagaactgtaaagactgcattcagaatggtttctgaggaagaactgcaaaatattacttaactgctaatttcattgctttcagaaagaccaaacatttactacaagtatagcatctcaaaaaaaacaaacaaacaaacaaacaaaaaacagcaaagtcaaacaaatgctaaaacatccaatgagtatctccaaatattgccaacccacaaataaattatatagtacaaaactatatgaaataaaatggtccattggatacccataaaatatgcccaagtagttgattgaagaattttttacaaaataatctgaatgtaatagcagcaagcacaatacccaggcattgcaacaaagtgtttagccatgtcttgataggatgcttgtattgtgacttcagatctccaacctccaccgagtgaatccgaagcccagaagcccctcataccttacaaagcccttggttgtacctcagcagtgcagatttgcataggctacatgaaaaacccaccaggggattggaggacagatccacccttccaactcctaccattgcgcatgtctgccttcctctcatttgtgcttcgattgcaacgctgctccttcccagccattatcccaatccgtggctcccagaaagaagtccttttctccacctccaaacctggcctgacatgcagatctgccctgtgaaaccatcaatccacttctcaactaccgaccatcaagaacttcctgaagtatctagtacattccaagaaaagttcacttcaacctctgtgtctactcttcctataatttaccctccatatctgaaccaaaagtatttcctgaatatactctatcctgagcttccccttttccctacttcctttgtctgagaggaggagatgacagggtcagctagttcctggttccccagcctatggctgcacctagccatgggttgagataatggggataatggctgggaaggagcagggttggcaactgaagcacaaatgagaggaaggcagacacttgcaatggtaggagttggaagggtggacctgttctccagtcccctggtgggtttttgatgtagtgatgcctaagcaaatctgcactgctgaggtacaaccaagggctttataagttacaatgggcttctgggcttcagattcacttgatggaggttggagatctgaagtcacaatacaaactggtaggccagtttcaccccatgtttctttttccttttatttcctccatgacttattctatcacctgccaccttctgtgacttattctggattgctgaatgactctagggtctgacttaagttttcatttgtcatcttatctcattttcaccctagaagctatcatctgtctctgtgactcactttatgcaagggcttcacaattctttatcttctgttctttttttctaatctgaattcatcctgcccacatccctgccacttgtgcatttcaagaatatatgtccatattcttcaggagatgcaaatatatataatatgcaaatatatataatatatgcgtgtgtatatatgtatatatatatgtgtatatatgtatatgtgtatatatatgtatatatatgtatatatatgtatgtgtatatatgtatgtatatgtatatatatgtaatatatatgtatatatgtatgtatatatatatacacacacatatatatataatggtaaatatgtacaaagcactataataggataaataatcatttatagggtgctctgggaacacaaatagaaggtgtcaaagccctaaaggaagtggaaaggtggatatcaaaactctagtaatggagatgaggtttgatttcagttgtaaaggataaagaggagttggtcaacagagaagcagcagttgcagaatcttccaaacctaaatgattaattggagtattttgccctgccttgccaatgaccagctcaataatccattcttagacagttttcagaattcaagacaaatttcaagaaatattttttttaaatttagatctggtcctctttatatttcccagcatatccaaattgctcccaggagaatttccatgtttttcctatagtactcttcatgatgtagccaccaattacagatgtagcctcttccctcatctgtgtccacataactgtaccctcagatggtttgctgtcttctggttcttgcctttcacatgctagtttctctgtctcacacccatcatctcaagatgccctgggaaattcctgcttatccctcaagaccaaatggcttagaaaacatgcttcttactgaaccctgcctgatcacaccttgatcactcttttttctctaaagctgtttcttggacataactctatgtcctgagcatggacaattgccagaatctgctcactgctgaccttccccagtacactatgtgctccatgaggacagaggcctccttcatatccccagatctagcacaatgctcaagataaacctcctttgggtttttgaatggctgttagaaatgccactgtaagagatcatactcattttgtccacctcctctcctgctgagggtctccactgaattaagagaggggaactagaatcctgttctcctgtttcccttccacaggtcttttaggcatgttgctctccttccatgttaattcccctaatgatcattattgatcccatccattgtggagcatcaccagccatcattcctttggagttttgttttggaacccaggtttggatgaattttgtctttgggagttagtctcccacaatgagttacatcccacaatcaatgatgaacagagaggtgacatgttccctcctttccaatgcctgtctcacagatttgttctgcagagctcacagacaggaccaactgttcttcctgtcgactgccaaaataagtcagcagttgggaaggagaaaaaaaagactatgaattatggaaaataactgggaagataaaatggcaatacaatgaaaaaaaaaagtaacaatctcagtagccacccactcatgttactgtctcaaatttcaaccaactaaaagaaactaaactaaatgaagaagaacatctagtcaaccagaaggctttgaagtagaccagtagttaagagctttccccattgatctaactaattagcctgactgtcataatgcatgattcagtcaaaatctttggcaaaactgtgttttattaagacaacagatcatgtaagggaagagttaggtggaaaggggcaaagtgacaaagtgtgtttggaataaactccattttcatatgaaatggctcataaaacatctctggccaaccattctgaagacaagtctgacctataaacctttcccgtacctgatgatgtgtacacacgtgccagcgtctggtggtactgtgatgtatggcataggctagggggtgttatcattttaatgtccccagttcatgcttgagagcacacatgttagacttctcactttaatggtgtttgtctcaagtgctaagaatctgattataaacttattgcaagtaatactttccctttatctaacagaatatcatctcagagcttccttggcacaccacattaggatccaccaggctctcctgcaattacttatgtctgcttctcctaagagactatgagtgccttctatgtgaggggtattcctcacacctacctcggttctgtgaattcttcaaataagcacaacacacaagagaattacttaaaaagtgtatgaatgtggcttacagctatgtgttaagaattttctttggcagctgtctttatcaatatcagtacgtttggataagttctcatgccactagagcttgtcatataaactgatttcatgtcatgctaaaatttctttttaaaaattctggaaaagtatgttcatccctactactgtttgtgcaaacatccagaagattgttgctcaaagatgactttctcatctttcttgagacttttaaactttagttctgaagttctataattgcagttgtacaaacatttgatttataataatatgtggcatagtgggaaaaattatagaagcaaaacaattttatgcatcagctttatgtttcgtttggtcttttgagtatttgtttttctttttgtaaactcaaactccctgctatgagaagaggaaggaaagattctctctctagaatgggagaatccattcatggggatgctcttatcttctgactgatagtcaaggccagtgtttctcttttgcaccacatggtacaacccacatcagtagtgtgtaaccatttgaaaacaatgttgacacatgcagtaaacatacttattacaacaaagcctttgggattttgattaaatgtaatagtgtttaagaatcagagacatgtactctaattttctgagtttgtttcttctaatcctctgctggaaaaatattttgtctgattatttttccatcatcattttggtatcttcatgctgttaaatgtttccctgctgtttgcattttagatgggagtccgaaaagtgtttctaaaatactggcatgctgaccaactcaatgatttgtgcctacagttgcagagaaaaattataacctgccaaaaaggtaacatttatatgccaacatttctgaatttatttgagttgtgaaatgcaaaatcttttagtgcatccccaagtttaaatgtcgatggggtctgcaccctagtggaccactctctcgattcctggatgctatcttcaggcaaatagtttttgggtgtttaggaagcattgtggcttagtttgctatgcaaccatctcaaaatcaacatttgcagacattgttcatgttttaattagacatcctttttctgtggggctcatttggatatgcccctatgtgaatctctaatgggtcttttcattttctgataataaaaagtccacctgtaatcccagttactcaggaggctgaggcaggaggatcccttgaggccaggagttcaagaccagcctgggcaacatagtgagatccccatctctcaaaaaatgtcttaattagtcaagcatggtgggacgcaacaatagtcccagctactcaggagactgaagtgaagaattccttgaggtcaggagttccagcctgcagtgagccgtgtttctaccactgcacagcaacctgggtgccagagcgagatcccacctctaaaagaaaaaaaatcaaaatttagaaaaataaataaaataagaagccctgttacatgctagtcccttgaacagtctctgttcagattttaacacatccagctcaaataatgatcaaaattctgaacttcattctaagttaaaacatccttcttggctgttccaggcctgtcccatccttactgggcatgggactgatccctacctactcaggttgcctctgggtcttccagggttaatgaggaggggaagaggtaaggaggtgtcttctgatgaaggtaaaaagtcttctaacgataaaaagacctgcttatggcaggtgttctgatgacacaggtgtactatggcgctggtctcctccagctggggcagacttcaacagctctccacatattcaggagcacttcagggacttccttctctaactggcaacatcctcctttggccggtcatttgtaactcacccctcagcccctgggcaccttgcagaccctctgttggagtctcattgttctctcagtacacattctttgtgaaaaccacatctggtgcccaagaaacaaactcttagatggcttcctaggtgcagcttttctctaacagagcctgtgtttccatgcaggggcctggcaggagccattgccacagccctggcctcagagatatcacagtgcacagtggccccaaacccccaggagccacataccaagatctctgggtggcctcctgaaaccactttcaccaggctgaggcaaggggaagccttggacaagagagggccaactgctacctcttggtaaaggaggcatcatctttctagtgtgtgatgacctggctgctaactcttggtaaaggaggcatcgtctttctagtgtgtgatgacctggccttcttaacttcaaccttcatcagtgcaggggagagggcgggctacagggctgttttggatcatccccttgcaagtcctatttgcatgtttggccctgccccaacccatgtgtccctggaacaccagcgacaccaacatcgccagggatctggctagcacagcaatgcctcaggccccacccaggacctgtggcatccagagctttatctgcagccttagctgaaactgggacagggagagtctcatttaatctaacgctaaagacagaacagggtatcacaaattctcctgaaaacttcccttaaatataatgataagaaattttgccccattagaaatttctgttctatttaacaaagattaaatttctataccctattgacctggaacagaaaaaatgaacagaactgtaattacttgttcacttttctaaagataaaaattaagaatggtcttaaaaggtcgggcgcagtggttcacgcctgtattctcagcactttgggaggccgaggcaggcggatcacctgtggttaggagtttgagaccagcctggccaacatagtgaaaccccgtctctactaaaaatacaaaattagccgggcatggtagcgcatgcctgtaatcccagctactcgggaggctaaggcaggagaaccacttgaacccaggaggcagaggttgcggtgagccaagatcgtggagatcatgccattgcactccagcctggcaacaagagtgaaactctgtctcaaaaaaaaaaaaaaaaatggtcttaaaaaattacatcaagatagaaaccataatctcatattgcataaatgaaataatggatatgagtattttttaattacaggcttgtaaatgcaaagcattaattattgatttttattttcatagctcttaaaacagttccctcaatgctttttgctaatattaaatttactcaaaatttatataatctggaaccatttccagttgttgttttaagaattctatatttttctttaaaaatgtccaggggaaagaaagctgtaacttttagttttaaatttaatcattttaatttaaaattattcctaccagaagttttttctctgactctatatgctcattttatcctggatgaaaaatatctgtaaattaagaccttacatgggcggtatcttagaagcagtcttctgaatttgtctgaaagacaacaaacatcaacatccattagtggcaattttatttttaccagttgccccttattgaagatatcaatatttagcaactggtgtaacatttttaaagaattttaaaaggctattgggatgaagtgtgagaaaatgaggtcttccggaggcgggacaatagactccgggtgaaagtgaatccagtgaatagctgtgctgtagtgggaggtcaggagaagtctggcacatccacattaatcttctctttattccaagagattaaacatcttgaaaatactctctctttcacccttccgaaagccaatgtctccctttttttttagtgtaacaagaaagaacgagtgaacaggccaatttcaagtcttctgcctttttcgcgctcaaggtgcccatcacatggttcatacgtctccactttactccacattttatattcctggaagtctgactgtgcctcatactgtttaacatttttcctttaggttacttcagaatgactgttttacagttaacttaatgcaactgcattccaacataactaaacctttagtagtgccatctgaaaaaaacgctttcagcatttcagatatccacatattattttcctgttcagccatcatagtagaacgttctgttcagctttctaccagctactcaagtaaacacatcaaagttaatatcataggtacccctcatatttattattttataaccatgaactattttaaagcacttaatattttataggcttcctcctttcccaagggcaaaaataaagtgtctttgctgcagacattggctttcctgaaattataactcttctataatcttaatcaactccttgtaatcctagaaacttttaaaattgggagagacagaatcacaaagtttgaaaagactctaatcagaattcctctacctgcacttgtccacttcacccatgagaaggcgtcactgtgctggccttgtacacactcagggcccaggaagcaactctttcatgaggcagcctgatccacttccaccctgtgctaattgttagaaagttctttctaacactgattgcaaatatgcttccctgtgactttcttggttgctgatctgccccctggagagtgagagattatgtctgtgtaactgcaggctaaggaaatgtagtttgacctcctaagcttggggacatatgagcccgggctctactattccttggttgtgttgacctggaggaactttcttagttttactaagagaagtgccattgtgtctgaaattgagatagcggtatattttgtcattgagtttcagaattgaatgacgcaatagagtgtcttacagaggtccctttaaatggtggtcttttatttttaattcttgtatttgttactgacatattgatttcaaagcattttcactcatttcccccaacttttacacatttttctagccgtcctttcccagagagcaggatggatgtcctatatttatacacaatctttttccagagtcttaaatatagtgttaatttctctaagaattaaatcataatcttagaaacaatatatgcatgatatttccaaagacaaaccccataagccttaggtgtttatgtaataatgtgatgtaatgaaagatgatccgcacatcccaaaatgctgcagttggaggcacaccccaaaattctgtgggatttagacctagttctttcccactgatttaactccagtccatcaaagtccagcttgtgttaccaaaaacaatgtggaggcctttatcatcaatatattgcctgcaagatctcattcaagtcaaagagctttgcctttagtgttatcactgctgatttagataaattcttattctgggttaaatgtaccttattctacaactgctcagagataagtatattatgatttttgtttgtgcatgtctgagtttttcacttttcctccatttactaacccatgatccttctataaaagttatcagaggatttttagcacgccagcacctgcttcagagaataagcatcagacaacaagaggtgacttctatcaatagctttctgcagaacacagaggacatggggctgaaaacctacgatgccctggtcattcagaatgcttcagacattgcccgggaaaatgaccggctccgtagtgaaatgaacgctccctaccataaagagaagttagaggtcaggaacatgcaagaggaaggaagcaaaaggtaaaggcagagagcatgcaattttaattacctttgtgattggttcagtggagtcatgaaaattcaaatagcccttaatgcagagttcaatcaaatatgacaggagttgcaggaacaggcatgcgtggtttgttattcgaaatggcagcagtctaaaaagatgctttcctgtgctgtcttctcacgagttcaaggctttctgtgttccttcattcatatgtgatgatgactgcctctcctgccatgcttgtgtcacttaactacctcaagcacactctagttctaaagcatttactgtttctgtattagcaaaaatatatagcttggctgttgacatttttacacaagcgttacggatataaggctggcttatagaaacttctggaaatctgacccaaaaaatggagataccactctgaaaacatggaagaagtgaactcaatagatagattgtaagtgtattatatatccctgtgtaaactgtcacgtctctctttaccaataaagcaagctttggggaaagctttgtatttaaaagttcactttagaggcttagcttaaaacagaaatgtgacgatcacctggtccctctccatttgatcattctcctctctctgtgaatgatgaagacacccgtgaatcacaacacccctaagagggagggcaaggagctgcttcctttggaccttaattcatcgtcagggagatgtttgttttgctatagaaacttggtaatatcttgttgtttctcactgaaaatgactctcctttcccatttctgccgatgtcaatttttttttattaaagtggaaatggcaatgtgtatcttgttaattagcttcaaatatctcagtgattaaatactgaaaaaaatcccctttgtacagaaaaaaagactgtaattaaacattacaggaaaaacaaattatccactgagtgccatgctttcatcttcagctatttcattttctacatgggcggctggctctgccttgtggtagattctagccctgttggtgttctgccacagaaagatataattataaaaacaaacgcttggaaactccttgtagaatgaatgcattggcatcttgctagcacatgattacgttgacatgcgaagccagaagaagtttttttaagcaagataactattaattttatatgacttccaaaataatatttattattttctctgctggaactaaacggccaccccaatttctcaatttgattatgtatgtattttcctgatacaaaattaagtgaagaagtatttgtctgtttatttactgaataccagcagtttacttggcactggacaaccatatggagtcaaggaggagaaataatagctctgcacataattaaataatttctggtagaatttaagaggcaagaaagagagtaatggggagaaggagaacactgaaatgtaaatttctgagagttttaagtagagtctatcctcttgcgaggggaaatggtgatgaactcccagcatttgatgcatcagtaactctctattaagatggatttgccagaaattatcattcagattgaaattctggttttttgatttgcttaataatcagagtgtgaagaattcattcagtgagtgcctgatggaaaatgcgaaggcccttaagtagtgttgcgtttgtgtgagaatgtttaaaaagtaatcatgatggatatcccgcgggctcatgtgcttttcatcacaaagccggagccagaggacgggtggccttctctggaccaactggtcaccagagggctgcacacgtcctccagccacagcaggaagggctgcttgccaaaaagccgtcattatgtctgcttgagcaggttccttgttaccggaataatgcatctgggcctctctggcgtggtgctgtttgtgttttgtttccccctaagaaccgatgacaagagtggacccaggcatttccaccccagctccatgtcagtctgcgcggccgtggatggcctgggccagtgcctcgttggcccgtccatctggtctccttcgctgcactcggtgttcagcatggatgacagcagcagcctcccgtctccacggaaacagcccccgcccaagccaaagagggaccccaacacccggctgagtgcttcctatgaggctgtgagcgcctgcctctccgcggccagggaagcggccaacgaaggtcagccctggggagggacccagcctcgtgttccgggctcgcgcatgctctgacttcgccttggggcgcccatggcagtactgtcgccctaatgtattcttaatagaaataaatccaattgttggcttgccagcagctcttaatcattaaatataaataatatttattcaaatctctaagcctcttagggaaaagctacttacatggcatttccttaactcccatccccaccctgcctccaaagagcagtatcaaatcaattcagaaagtcggcagctattccatgtaaaggttcaccaatgagaaagtaaaaaaaaaaaaaaaaaactgcttcaggcattccagttatcacaatctaataaaaaattaagactgcttcatcatatgataagtgaaattatttacccataggagagtcatcgtgcaggaaacttctgttaggaaaacttttgagactagattataaaagtttctgcatccattgtctagaaacagggatgctcaaaagggaacatagcagtttcttctcagccagatctcatagatcagtaatgagacaattactgtttaaatattaattttaagaatggtgaaaaataaaggaagtgcttcttagcggaacacttagaatttaacagattctattgatcacccgctatgcatcaggctctattctaggcatgtctgtctctttcttcatggagtttacattctagtgcggcaaaacagatggtaaacataatacaacagtaaatactttagaactggattgttgctgctgagagaaatacatagacccagggtagtagtacaggatggaagagaggttgagattctaaatgaaacggctgggtagaactcgctagaaaataatatctgagaacataagatgaaacacagttccttcagtaaataaatgaccccaaatacaaaaacacagcaaatccataagctcaaacgttgggatgactgacaccaagaagataataggaagacatggggcagaggactgaagcagtaagtccatcctagccaacttctttttttttttcaaatttatttttaattgacataaaattgtatgtttttgtcatgaacaacatgttgttttgaagtatatgtacattgtggaatggttaaatctagcaaattaacaaatccatgcctcacacagctatcatttctgtgctgagagcacttagtgtccacttttttagttttttttttttttttttttgagacggactttcactcttgttgcttaggctggagtgcaatggcacaatctcagctcactgcaacctccgcctctggggttcaagtgattctcctgcctcagcctccggagtacctgggactacaggtgcctgccaccacgcccagctaatttttgtatttttagtagagacagggtctcaccatgttggccaggctggtcttgaactcctgacctcaagtgatctgcctgccttggcctcccaaagtgctgagattacaggcatgagccactgcgccaggcctttttttttttttttttagcattttttaagaatacaatatattgtcattaactattgtcaccatgctgtacactcttcaaagtgctttttattagtggcattaagaaagaatagacctttaggatatttttcacttacaaaaagttactgtcttagtatatcagccatgtttcaacaatgcttagatcaaagcagaggagaaattcctaagactatggggaggagagtccaaatgtttgtctttagagtcctggtgataaggacaacaagaaaatctgtaaaacgacattagatgagatcgtccataggaaagtcttcaaagtggacattgacgtgggcttagatataaattagaacaggacctccaaagatatgaggcattctcccccggtgccacatataccaggagaagcccaggatctgagggagccaccagcaccctccctgagaaagcggggagtgtcccgttgccactgttcctactttcaggcctccatgttagatttgcggcccatatctcaaaaaggtgtgattagaataacaagaaagatttttggcagcttgcgtgaggaagatggtatctaaaatgctaagaccgataagatggagagggtacgaaattaagactccagatagtaccagacattgaaaaaacagtaatgaaatgtgattgaaaattgcagcaagtacagaatggagccccatccgagcttgaaccctgcaaacaggctctagaaagttgcataaataggcttcagaataccttgtaacatctagaaaaagctaaaggtttgtgtgcaccttaaaacaccactgccctggagtaatgaggggaccactttgtcacatgttatgaagggggatcaaataggaagaagctgacctcagagagctctctcctatgggcagcaaaaaaaaaaaaaaagtcaattaaaataaaagttaggaaccataggagatatatatacacacacacacacacatatgtatatatctatacacacacataatatgaaagcaaagtgaccccaaaaaagattaataaagaagacagctatcataactcttaaattccttattacatgctatcaaaatacatcatgtgatagcattaggcatgcaagatatttatgtaaaatttagtttcttggatcctaattttgtctcatatgtgactataaggtacttagagatgcgtttggtccactgtgtcgcaccctggtgagcagacctttcagaagcttgtcaaagggcaagtgtatgcattgtttcctttttaccatctacattatctgttctttcttacagtacataattcttcatgctggttactttacaaccaccaccacaaaaagaaagtctttgatctcctgcaactagagatgtatttctgcattctggcatgtgctctcaatactgtatatttttaagaataagacaattaaccagcttaagctgcttgagcatgcttgctgattagtttttacagcattagggagtcagagagggcaagcgcaggagcttagccactcagtctgtcagtggtctgggtttgtaatccatgatcgcaaaggtagctccacccacacgtgataagccagctgtcagacagggttctggtcccttctgtgccattatgtcaggagctgaaggtggttgagttaggacagtgatgaaattgatcctagcatgttagacatctccctcagtccaacacaatccgagtataatctaagtctttgttgttcaatgcagtagccactaggcacacgtagccaattaagtttagagtaaataaaattaaatacaattttaaatttcattcctccatcatcagtcactttccaagtactcagtagccacaggggtagaatttttccatcatcaccgaagcttctcttagacaaccctgattctaaatgctttgtgtgtctaccaagcggtgatactgaattttttgcatctagtaacgtgtcacaaaattattctcctttctgtcaaaagataggaagaccatttgatcactattctaaaatgtttggtgaaccttggtttcgcaggatcaaggactacggctgaagttggttttgtacctgagccatcctttttggcatgttaaaaaatcaagttcaagttcttttcctttacaaataaagctgcgaatcaattcagatggttacagagtgaaaggagatctgatcggagaccaagggccaaggattgtagggtgaccagcaccacggtcacttcaaagttgtctttgtatttattcttgttcttactagcatatgtctttcctggtaggtcttcacccaataaaaatggttgtggtgaaggaaaacagtacagagagcaattttttctcatttcctttgtgcctcaaaagcgtgaaacaattttgcaggccaataaatgttaacacttctttgcaaactaccagcaagctagagacaacttttttttttattatactttaagttttagggtacatgtgcacaacgtgcaggtttgttacatatgtatgcatgtgccatgttgctgagacaactttttaaaagtactatgtttttgttaggtcagtgcaaaaggaattgtggtttttgccattgaataaaagcctgcagttgctctttgcaaatagtggctaggaaaggaaagatagggcctcgttttcacttcctcttggctggggcctcccagctggagtgctgttctgcagagttcattcctcacacaccgggtgcagcctttctcccaaagacggttaacattctctcgaattgtctcctgactgaagttaaatataagcctgcatttcatgcgtgtgactttgaagaagtgactcagtctttccaagcccatgtatgtcaagtagcagcaacagccgagacatggcaagggctatttctggggagttaagaagcaaaggactgtaaagcctcattgcccaggacgtagcaagcgcacagcaaagttacatgcatataactttgttgttaatgaagcctctgacagtcagtttcctcatctgtgaaatggatactaaatcctaagatgtgggacttgcaattaagtcatgatgtcagtggtgctgtgcctggcttggagtgacggttgctcaaggtgaaattgcagaagcaagcttttctcaggcagctctagtcctcactgttcaccgttctatgttgatgcttccacactcaccctcccttcagactccagctgtcccctccttggggatcataccttaatgaaaccataattgttttttccaaaattgctgtacaactgcattctccacaaaacacagtttacatgtgtagacacaatcatggctcagctctgtggcttaatttggaaataatatgtcttttctttactctcttgtttctgtcttcattctagaacaacatgtgtcacatagtaagcactcatcaaatacttaccaagtgaatacatgttacagaaatctatttctctacactctcttcattaaaagagaatttgcttcctatcggtatatgagagggagcacaatttggcaaggttcgagaagtacccttgaaatgtgtcaaggctagatttgtctgcatatttttaacagaagccctttaaaaaaattttaaatggacagaaattaggtcttctgtgttgctcttctgagaaatgtgttactgggaataacagaacacaattgcacagttcaccacctatgacgcagttgtacatccaacaaatagtaattaagtgtcttccatgagcctggattctccccgaggatctgacagaccagtaggagagataagtggtcaaacaaattataggggaagcacaaccacagcagtgaggacgtgatgggtgcacactgggccacagagtgccttgccctccgtggaaactgcgaaaggctcaggaagggcatgccaacagcatcgagtgcagtagtgcagtcaagagggtaaaagatgggggcatggaaggcaatggtattgcctgaaccgctcctcccaccaggaaagaaaagttataacaaagttgcgatatatgacagctcagtagaagtcctttctgtccattttgcagctggttgtaaatctatcctacatccactcatgtacgcagcctcagcagtcagctagcaggcacttaattaagcatcttttttgtcctaggtcctgtgctctgtgctatgtttgctttcgctctgaaactagcacaaccacactagaagtgttggaaaatggaggagagttacacacgcagacactgtttattttggatgaacaagcatctcattcctcctttttctcatagattaactatgcaggtattttgttcttgtgagaatgggaccaaataacttatgcacagaagatgacttaaaagtcaccgacatgccttagcaaaaataccaaatggaaaatactttgtaggagaaaatgttgatctcctaacgtgacacacatgtccgtatcattctgcagcagttcagataagaggcaactttatgatgtaatgagatggcttcagaatgtagtctaactcctaagctactgttaggatcccagaacctgccctaaaagtattctgtgatcatggactgtcttccctacttcatctcattgactttatcaagtagttgcaaacattttatgcatcaatattagaacaaaaaaataagaaaactcttgatgtaaattcatttttaataaccctctaaccagtatttgcaaatgaacttttagcacgtgtacacatgcacacacacccggaagtagccacaaaccaaattagactttaatttgttaactgtggttttctaatttcagtttataaagaatgaatatttccagttctgacccccagaggttccattttaattgttatggagtagaacaggataatgcactctagtcatctgatgttactgaaccccagaccacactttaaggaacagttctatctctcacagtaagtttctggttgtgtagcggtgataatgtcgatcatgatggatacttagtgatgtttatcatgtgcaggcattaagctaagtatctttcatctgtagaatagccctacctagtaggactgtcatcatgaccctatgtagagaagggcattaagtcactgatcaatggtgtaacttgtcctgtgtcacataggcaagtttggacccttgagtcaggttctcaacagcctcccaacaaacatgctacttttatttataattgtttaatgcaaaaaggctcttcaccgcatctgaatcaaactttgagggaatactgtaccagttatgtgtttttgcataacaacccacccagaacttacaggtttacataaagtagtgattgttttactatccctctcaggctctgggtgtcaacagagatcactggagcagttgtcactctcggtccttcatgcagcaaggtggctggaatcatctgaaagctggtcacgggcatgtctggtgcctcagccatctgaggactgtgactccttgggtgtctctctctgtctgtgtggtctctctgcattgcctgggcagcatgacagcttcagggtatccaacttcttacagggagagtcagtgcttcaggggcatgtgctttgggagagagaaagcagtagatgcagcatcgctttcagggagccagttttgggaggtgagcaaactcccttctgccacgttccttccatcacctcagtcccaaacaccaaaccaggtttaggaaaggagaaacagattctacctctggaaaggatatactgtggtggccaaggtgttggaaagtaccatctgtatcagtccaccctctggacaaaacaatttgtatccctctgtcatacaaactatactcacccctaccccagactccccaaagcctccttcatcatctcatctggctcaggttcaagggccagatcgcatcgtctaaaccagatccacatgtgccggtgcctccggtacgattcctgagagagacagcgcctcaagtgtgtcctcttctaactgaagacttgtggcctaaaaagacaagttgcctgatccccccacacaagcaaaatgcatcagagggacaggtagagaataactgatgcatgcttctgctcagacacaggagggagatcaggcgacacacagtggtcattggtgggtagcagttgtgaacaagagctggatgcatgttgcttatgccttcatgaggatgaacaagagctggatgcatgttgcttatgccttcatgaggatttagtccagttcccaggctggaaataattttccgtagctcttaggtctatgttctggaatcttggttccccactttttgactaataattcccaatccacaagaggtgacttatgtttggggctagtagttttttcagcctgcttcttccttatcagggttgtgttgttgctgttgtttagaggtgaggtcttgctatgttgtccaagctggagtgcagtggctattcacaggtatgagcataacgcactgcagccttgagctcctagcctgaagtgattctcttgttcagcttctggagcaattgggactgcaggctcacattgcacctcgccaaaattttgagagaccaaagtttcttcatttttgtgttcaggctgctcctttcagtgtaaactgataacattcatttaaaagctttgtgactttcttgtgaatcaattcataatccacctgattagtcaaaagccacacccacaaatctttctgagataatctcttctctatctggaagctcactgagtacttccgtgggtcagtgcccttgatattcttagaagacctgtggttttgcttccttgaaaagacctatgaagcccctccttgattttttctgtgtacttcatgaagggtctcataagtgtgtgcttgacttcatctttagatcatgtttttctgaaaattccctgaattttatttctgcttggaagtcatttcttttctttctttctccttccttccttccttccttctttccttccttccttccttcctttttttgtttttgagatggagtctcactctgttgcccaggctggaatgcagtggcgcaatcttggttctccgcaacctccacctcccaggatcaagtgattctcctgcctcagcctcccaagtagctgagaccacaagcacgtgccaccatacctggctaatttgtgtatttttagtagagacagttttcaacatattgttgaaaggctggtcttgaactcctgaccttgtgatctgcccgcctcggcctcccaaagtgatgggattgcaggcatgagtcactgtgcctgcctggaagtcatttcttaacattcaaattatttgccatctgaagagcctggcagtgaggaccattttatttttaaactcagaaggttcttgttcctttatagtgaatagttctttctttactttatctctgtatcctcatgatttactctaggcagctagaagaatccaggaggcaactttaacactgcctggaaatctccttagctatgtcaccctgttcattttctgttttctattttccacatgactgtaggtgagatactattgctaaactttgtactgtggctgaagtgttgtgttcccttcagcttccagcatcttcctcactgttctttaggcctcatcaagagctttcttgaggccaccacgcttccctgatggtcccttcaaagctcctcccatgtcccaaagcaacttcaaagagtttaaggtttttttgtttttgtttttgtttgtacagcagcagtccacttccaggtaccaatgtttttatgacttgtctattgttatgtaacaaacctctccaacttagtagcttaagacaccaaagaaaaggttattatatctctcatggttctagtatttcgctgggctctgctgagcagttctcaaggagcctctctcatcactgcagtcagatagtgatcactggaagtcatagtcaattacatctctggtgtctgggatgggaaaccagacagctgagggctggagcagataggagtcctctggctctccctcacctccacgtagcctctctacagtgcccacagcatggctgcttcagggtgtacaggcctgtacatggaagtcagggctacctagacatgtgtcccaagggaaggagggggccaggcagaggctgtattgtcattgtcccagccctagaaagcaggcaacatcatcttctaatcattgtattcactggggcagagacagagaccctccccgattccagattctggaagagcatgtggcgctgaaaatattattgaagccagctttggaaaatacaatctcttacaaatcctttaaattattcatatcttcagagcaactctgtaatcttaatgttaaaaattgggttgcttcattcactttctagaagctcaggggctgctatgttttagcccattgaaagtaactggaataatgcttattaattagagaactgcacactttgggtactttctattcttaaaagttggctgctttggggaaccctgtatagtactgacttagaaagatgtccattgagttcaaaaattacctttgttcttttccattcccatttgaatgattcccattgttttctggtgacagtgtgttgagaactgagcgaagcactttccctacaatatctattttattccttcgagatacatactcatatcaccattttgtgcatgaaaaccctaaggctcagagagctttgcccaggagctcttctcaaattacaaccctgccctaccaagcccagcacaaacacacacagttctgtgaccctcaccctggcctgttggttctcatcttcaaggcctgcatcacattctaacatactgtagaactcactcatttggtgtatttccttttttgttgttgtatgactgttcccactagggtagaggagggcagggaacttctctttattcatgaatttatctcagtaaatactggttgaatgcatatgactgaatgaatgaataaaaggtcatgctgagatttgagcccagatccctctgattccaaagctttaattttaaccattagacttcattgtctcccagaaactgggtacagagactgatgtcaaaatgtgcagtcatagagagggaagaatacagctgcctcagttaaataactcaagaactcaacaaaggcagatgtgcccctatcaagaattcctgcagatacagaaaataccaacttagtaaaataattgaagatttgggagtttgggtatttctaagactggaggtaatttttctaaaattaacatctctgttatcagtgaaattatatttatttaataaaacattattataatttacagtaaaagcattagaaaaagaagtcttgtggaatttcttttttgacttaattttcaattgttttaaacttatatttaagtagttttgttccatctcttttgaaattcactcttgtaataatattatgctcatttgtttttctgagtatggcttcttttttcaacgtcagaagtttccccttgaaaagttcttagggaaatgttattctcttggtttccctgttgagtatgtgtttttgttaaggattgaaatgtactgattgtaaaacctgtcctccctgacatttgaacaaagtccttttttaaagtctctccatccacacaagtgtttttgttttgtccattttacatcatttatttaatttaatttaatttatttatttatttatttaatttgagaccaagtctcactctgtcgccaggctggagtgcagtggtgcaatctcagttcactgcatcctctgcctcctgggttcaagcaattctcctaacctcagcctcccgagtagctgggactacaggcgcgtgccacctcgcccagctaattttttgtatttttagtagaaattgggtttcaccatgttagccaggctggtctcaaactcctgacctcaagtgatctgcccacctcagcctcccaaagtgctgggactacaagtgcccgccaccactcccggctaatttttgtatttttggtggagacagggtttcaccatgttggccaggatggtctctatcttttgacctcatgatccgactacctcggcttcccaaagagctgggattacaggtgtgagccactgcacccagcccatttcacatcatttaaataatcacgcttacccatttccgacagtaagctttcatatgccactaactattaatagttaattggccaggtctcctgggtttcaaatcataaggaccagttcaacccataccttatgtcacacctgttaggtcctaagaatccacacctaagtgtgttccaccacctgatccctgagtgtcacttccccactgcatctccagggaccgcacctccgcagcctccatgggtggctgacatcctggtgtagcaggaccagccacagacaaaactcctcagacaccaggttaaagaaggaagtggctttattcggccgggagcttctgcagacttgcgtcttaagagctgagctctccgaaaaagaaattcttggcccttttaagggcttacaagtttaaggggtctacgtgaaagggtcgtaatagatagagcaagggtggggaacgtgactggggttacatgcatcagctaacagaacagaaaattttacaatgcttcttcatacaaagtctggaatttacagataacacaagtagtttaggtcgggggttgatattattattattattattttaaccaccagagccgggtggtggcaccaaggtcgtctggctatttattttacttttgtttctttttaactttttgctttctcctttttctcctgtcttataaactaggcaaggggggtgggtgggtagcagcagaagtggtggtctccttcctcactggaaccccttgacgttccactggacaacctcctcagagggtgggagtcttcttccatctccaagatcaaaactctcttttcttgggggtggtctcaggagttcgggttcagccagggagcctagcgggtggaggaacatgcaggcccggtcccttgggattctcggggcacggggccgtggctccctccgagtcgagccccgggcttggtgggcacccgtgggcctggcctggcacccactgaccgcgtcctttcctgccgcagctctggcccggcccagaccgcacagcgacgactacagcaccatgaagaagattcctcctcgaaagcccaagcgcagccccaacaccaagctcagcggctcctacgaggagatatcggggtcccggcccggggacgcgaggcccgcgggcgccccgggggcagcagcgcgcgttctgacccccgggactccgcagtgcgcgctgcccccggcggcgcctccgggtgacgaggacgacagcgagcctgtgtacatcgagatgctggggcacgcggccaggcccgatagcccggaccccggggagtccgtgtacgaggagatgaagtgttgcctgcccgacgacggcggcccgggcgcgggctccttcctgctccacggcgcatcgccgcccctgctccaccgcgcgccggaggacgaggcggcggggcccccaggggacgcgtgcgacatcccgccgcccttccccaacctgctgccgcaccggccgcccctgctggtgttccccccgacccccgtcacctgctcccccgcctccgacgagtcgcccctgacacccctggaggtgaagaagctgccagtcctggagaccaacctcaagtaccccgtgcagccggaggggtcgagcccgctgtccccgcagtactccaagagccagaagggcgacggcgacaggcccgcgtcccccggcctggcgctgttcaacgggtccggccgagcctccccgccgtccacgccgcccccgcccccgcccccgcccgggccgccccccgcgccctacaggccctgcgcgcacttggccttcccgccggagcccgccccggtgaacgcggggaaagcggggccgagcgcagaggcgcccaaggttcacccaaagccaaactctgcccccgtggccgggccctgcagctccttccccaagatcccatattcccccgtgaaggccaccagggcggacgccaggaaggccggctccagtgcctcgccccccgcgccctacagccctcccagctccaggcctctcagcagccccctggacgagctcgccagcctcttcaactcggggaggagtgtgcttcggaaatccgcggcgggaagaaaaatcagggaagccgaaggtaagcggagcagacatccccccactccttttgcatggacgctgtgcttgcgtgcacctgtgtacatccgtgtctgcgcagatgtgaaatagtaaagtttcaggtgatggccgtggtcgttcagagcagatatcagctttaaaaaaaaatcgtatacacccactgtgaccaaataggtaggaattaatatttccatattgcagaatatgataggaaaggctcgtgatatagaaagacgcagaccgcaactggatttaataaattataacttgataaatgttcgacagagcaaggttaaatgttagctactaatttctttttttaaaaaaatattttttccttataacgtgaaagtggtattttgtgtatgtttctatcgccgatttccgtttgatgtacagttcacagctaatccccgagcgtgcggtttgccatccatctagctttgcctggcggtgtctgggatgttgacctagccagttactaccctgcgcttaatgccactcggctgtgggctgtttgggatgaactgcttttcttctggtcgtatgccatccaaggagcactctaacgcagccccgttatctgtgttttctcatccagcgactcagcccacagtggggtttgcaggtggaaatcagtccactcaagtgagctccatgacaggctgttgcctgcattcaaaaacatttattttgtgtccctgtagaagaatgtacctggcaaaataagattttcatgacgacgttttttgccagtcttttgtaactggctaaccacatggctcttccttcagatgacacgacctcagtgccaaaggcactgcttttgcacagattcctttaatcacaaagaatgtcttcctcttccaaaagacatgttaaggtttgtatacaaaaccaaaatgttttctcaatggtgtgtattttggggaagaagttcattgatgaaaaggatcttctccttaaggaaaattataaccagtctcttccatcatgatggcactggatcccccactcgcctccaggtgaggcaggaggatagggtctggaggcagggaacctaaggccctttcatgtcgactccctagaactaaattgaaaggaaaatcataattttccatgcctaagtaacaaaaggacccaaggctactccctctgcaaacccccaccttttctgcaccacagatgggaaattggctgtccgcaaccagtcagacttactgcaggcagagtcttcctttgtgtacaaatgcaactctataacttcaccttagcctctgttccattgctttttgcaaccaatcagatgtttgcacaggagtgtgatcttttaacttcacttcagcctctgattggaggccaccactttatttacatgaggtgagcatgaagtggccaatgggaaacctctagggggtatttggacccgagaagattctgtatctgcgcccctgagctgctgcccagcccaatcccacactgtggagtgtacttttgttgtcgttaaatccctgctttcattctttcgttgcttcattctttctttactttgctgggtgttttttccgattctttgttcaaaacgccaagaacctggacaacttgtagtcaagaccctctactggtaacacagggtagatggcaactgtgggcattctcatttcatacttggaaaacttcacggtggagaggttaaatatcttccttagggttaagtggtaggattggaagtaaactttgacctacagtgtagtaacactttatgcatgcattaacctgctccttcaccaaaagaaaatacataaatgtgtaagcattcatcatttgattagcgaaattactttaggtacaaaaactagaacatctagaaagcaatctgaacaagtgaaaagtaggtcaaggctaagaaactttaaaaatgaatgaataaccttctccctatttattcttcagacaaataagctaattgtttgtttagctaacagattcttcttaattataggccattaataaatgaaattgtacttctaaatagcagaatgtttgaatttcacacaccgtgtttcattccaaggaacaaaatggataagagaaaatcattaaatgaacaaattaatatttgcttttagaactaaaagtttattaaaacctcatgaacctcattttactagagaaaggaacaaggtgagttcttcttgactctattcaaggaagtgaagttaatgaatttctagacagacctcatcatttggaaatcccaaagtctactccttagaggatagtgagaattatagtgagccctccaggcatagtgtgtaaatttgctaattttatttccctgtggtggtattaaccagtatttgggaacacacatcaaaatctcaagtacaacatagttcaactataattataagactctattttcttattgtgggcttttctgaaatccaatcatttgaaaagattggattgagccacttatgactttctcaaaaatacatgaattggcaactttggcctttggcatagttgctgtagtaatagaaaacttagcaataccagaccaggtcatccctgtacataatctaactccctgtagttagattatgggagtcctaactatacagttgagaagtgtataataattcttttttttttttttttgacggagttttgctcttgttggagggcaatggcacaatcttggctgactgcagcctctgccttccaagttcaagcaattgttctgcctcagcctctcgagtacctggaattacaagcgcccactaccatgcctggctaatttttgtatttttagtagggatggggtttcaccatgttagccaggctggtcttgaactcctgacctcaggtgatctgcccgcctcagcctcccaaagtgctgggattacagacgtgaaccaccatgcccggccaaatgtataattctttatgggctgtgatgagggaaataagtttacaagttcggatatcatgttctcatggatagttcaggccattcttttagaatgtaggagaggttaaacataagctatggaaggaaaagcattcagtgctggtgctcagcactggggctggttatatgactattaaagtttacacagtttgatcctgaggttagtaatccattttcttctgaatgaattcaatgacttttatggaatttctttcaagttttaaatcttttactttaccttctttatgcttaaagacatttttattttcaccgtgaaatagctttcttaccaaataatacagtgtgtggctaatttacccttcagggtccttaaattaactaaagttcattttttgttcaattttcataggagaaaattattgcacaaattttgcagaaaggttcaaaatgttctccttggctgtttggaacaatgacatcgaggagattaaactgctcagtaattcactgctttagttatttctggttgaaatataatgtgctataatgtacagtgagttgtgtataggaagcaaggttgtttcttgcgtaattctactccattactattccatagccttatatgtaggatttcacaaattctatgttgcccaaaccagttcattttctatagattcttggatatgcaatttgaagtatacaaaaccatgcagattctaagagtggtggacacacatataagaaagatatgattgtgcagatgatggatgtgactgcagtctgagaagaaatatttgcagcaaggaattgtagtgcttactgtgccaggcattgtctgagtcatctaattctcacaacactataaggcatcttctccacttatctccattttacaggtggaaaaactggggcacagggagattaatctacttgctcaaagctgctgtgctcgtgcgggacagagaatgacttgagtgcagtaactctgtctctagagtctcttcccctagctacctatgcaatgctgctcagacagcaagagaaaaagagacagaaaaaaaaaaagtcttttaaaattaatatttgttcactgaggggcaacgagtaatagtcataagagtttagttgaagagaattttcccataaactcaagaatgccaaatgaactttatactgatgatgggtatgtataattctgggatacagtgtctaggctacttggcccttaaaattaatattgactaaatgtttaattgtctgttccattctagacataaagatcccattaattcacaacatttttttccatctcatgtgatgatgtggctaatattattatgctaattatttctagttgcttggtttcaaaaactatgagacccgattcaaatggtgaatgagagtccttggctcctttaggccactagggtgctccattgctctgaatggcatctcagcgtctggttgagtttatccagaataaagtgaaatcacatgagcatgttattctctactcactgaaaaagatcaggaagacagggtcttgacaaaaaatgcagtacatctcagaaatctggagaagaaagtggaagacagccaggccgaattaacgaaaatcagactcaaaatattttttaaaaattcagttttattacattctgatacagtgcatccttagcttataagttataaacaggtactaaaaatgatgtcaacaaaaaagctgtaatgtacagtatttctttgcatatagtaggtggctattaaatagttgtttgaggtaaaatttacctataaaagagcagtttgacatacaaatctatttgatagaactagctcttgtggcatttttacttaataaggatcacataagctaaatggaagtcactattaatttcaaatattttatttgattacataaatattctgaataagaacattatgagtttggagtgagagtattttataaacaatttttttacaatatacttttattccatagggccatttgtttacaaaataattgtttttcaagttttccttatggaaaatttcaaacatagacaaaagtataaagaatagattaatgaaccttctctgtggcccatcctatttcatctctactcctgcccatttccctcctctggcactggatcatttttaagtgcatcccaatgtcaaatcagccaggcatggtggttcatgcctataatccaagccctttgggaggttgaggtggaaggatcgcttgagcccaggtgttcaggactagccctggcaaagtagctaaccaggccttgtctctacaaaaaaaacaataatgataataaaatagccaggcatggtggcatgtgcctgcggtcccagctacttgagaggctgaggtgggcagatcgcttgagcctgggaagtggaggctacagtggccgtggttgctccactacactccaggttagaccacagagcaatacactgcccagaaagaaagaaagaagagagaaagaaagaaagagagaaagagaaaaagagaaagaaaaaaagaaagagaaaaaagaaaaccaatgtcaaaccatttaaataatatatatttaaatatttataaatattttatcatagatgttctttaagaagaaaaaaacatttattcttaaggcattttaataagtactcaaaccaatcaatccatttcagtcttcacgagcatgaagctgctattcatgacaaaagcctgattctcgaagccagggcgtcatttttcacgacacaaacaaaataattcttgggctagcattccaccaagcaatgtgactctgcaaatttctccaagggaacacttgcagacagccccttctactacagaaaaaaaaaaaagattctaaatattatatcaggtagaactaactatgaaagatcaaaattcaaagacacgcaattgcatcctaagtcaatatcatatgggtttcagatgtttctatgccaaatcaagtgcagttacccattcattgtttagcgacaagatgcaggatgctttacaatgactcaaatgcccctgaattactcatggaaacctgggatgtgctccaggacggtgtgtgcaaattgctattctctgctcctgatgtttgaaacagaagttccaacattatcgtcatttattctctgacacatcgaaacgagactgaagtatgagacattagtctgccttatgcaaatcttgacatcccataatgggatgcagagcttagcatcccccaggcttcttgcctatgtgcgggtcttgtagtgttttatcctgtctgaagcagttaaatctttttcactccccttgatgatttctccccacagtgatttatttgtgtgtggggagttgggggtgggagtgctcatgaaaattagaaaaagtgtggaagataatttactgaggtgctcttctgctgatgatctgtgactgtctgaattcttgtctcatacaaagtggggcgctcctctgcattccagaaccattttaaatcaatgcataattttcctcattttccaaacgagtaagtcctttggggaaactagattaacacccccagagaaggggggtctccatttatcactaagtggacattaagcaagcaggagctgtgtgaagtttcttcctttgccatgttaatagacctgggcttgacaagaagagaatatgtctctttggaagaaaaggattttttttctaatttctttgcctctctgtagtagccaagagtgcttgtgcctgagacttgcagctatatatttcattgtttttaatcccctaaatgtctagtagaaataatactgtgttcatctacacttcgaaatgaactttcaatgttaataaatgtatcagtaaccaaatttatctatgttaagagcacaaagctctttgttccctatattaattagaaatatatatttttaatgcctaaggatttgttgtgaatgtttgtgacatttttctcacaacttgtagcgctttctctatataaatgcccaataattcatacagggaaattgtgcaagcaggaggcctataaaccagacttgcactaacttgtggagctaattcccttacagtcatccaataagcatgtacttaatgtaagcacagggattgctactggaaatccaaaacactgataaacaaatctggcattgcctctgccctctcacagaccatataagagacagaaggtgcatccactttcagtgaaagaaattccaaagaggagagaatttctaacctgagggccataaaccactcgtggattcgtagttgagctccaagtggcccatgagcccccatggtatacatgccacttgtttgggcagaggcttcataagctttatcggatcctcccaaaatgtcagtgacgtgggaaaagtgaggagccgctgcaggagatgtgcacacacggcattttctgcagccagaagaagaaagaggtaaatgcctgagagaatctgagggccttgcaaccagagctggcagaagggcaagaggaatgttagaggcggatgatgggtggatggagctctctaggtgcagaagtcagggtaatagacactgcaggccaatggatgaatataggttgagacatgaaacttcagggtgtgtggttcctttagaatatagccatgcatttttgaggaagaaggaggagaaaatgactttccttgcatggaatcagagcctgataggctttgtacctggaagctccttgttagcttgatgacaaggctctgaattatctccattgtttctcttctgtcacataggaattcagcattaactcttaggatctttcctacaaagtgcaaagagccagaggaagaaaatgaacaaaaaccatagcagcgcttctaggtgcatacgtataatgggaaatactcagatatacactgtgacgtgttaatggcatcctggtcataatataaacagctatttgtaagtggctctctcctgttgaccaagcacattgacgtctcctttctccccctggacccttgcgtctcagtgaggcgggtaaagcaggtgttaccatccctatttattaatgagcaatctgagactttgagggattaagtgattttcccataatcacaaaaactaatcagtctcaaagtcaggaatcaaacacatctcctttctccaaaccctggattctttctattatgcccttcatagtctctgaaaacaataaaattaaaataatgatacaaggtctctgtttgagaaaggaattcccctctgaagttaaacacaaactcattgccaggaaaacatgtgggaggcggacagataaaactgttttgcccattgtcaatgtcccaccagacatcacttttgaaacagagcatgttcttcgtgtgccccctgccttctcctcctctttttctcccctttcctggaaaatcctttctacccacctgccataaaataccttctgcagtaccagggatgcacagcacacgtgatagactaggattattcctcacatccaaaactcgtgtctcctcactttccgtttctctttttcttggcctctttaaagttttacttgggactgagttcctaattactgaaaagaaattcacactgaaattgtactcacttgcagagtagcccagcatattttttgtaggacacatatgacttgctggggatgtggacttcaacctcataagtggggtgtcagatgcctgccccagacccaccagaaattaaatgggtggtgggccctcacctagcaccaggaaccatgctaagaactgtacagacagatgatcagcagtgattctcaatagcgaccatgattggaacaggggaaagacagacaatcaaaaagtcttcatcgtttgtctctacagcaactttctttaaacaggcaaaaatccattcctttctcaattatgtgtacgtagaaaccgacatcggtaacagcaaagtgagaaacatgactaaataaagccagggctatactcacagcccctcaataaatatttgttgggaaaatataaagctcattgctctcgtgactatgctgttcccgctaggtcatgccacttcattattctttgaaaccgaggagcaaaaccaagcagaaggttatgactattaaatatttagatcaatctgatcaaaaaggtaccctatgaattgcatgaactgtcctgagaaattaccttaacatattagctgtaaatctgcggcagctagcatgtcagtcagaccagagatacgtatctagcgtaaagaggttatcattttttagattaaccaaatgcaacaaagaagcctttacaaccgggatgctctataatgcaccgtcagtggggaaaggatctattgcacctgaaattctgaaaataaggcagacttctcagaagtggattctctttcataaccagtaaatatttttcatactatcaacccactaaagcaagcagctattgtatattgtgtctctacactggattgcaaattaaactcccactgggggctctaaagagaaatccagccctttatcctctaagccactcagcagctctccttaagcaagttaataaagaccttcctgactatctgcatctcattattgccacataatacaatatcctggggttttcttccttttgtgaagaaatgcttagaagcaacatggtgcatggaatattgtcctaaagagagactgggcaggtgccatgctctttctctcctgaagagtattggaagagaaaaacctatttcccaattacctaccagtgtttaggctccttatgcctgacttcagtcatttttatgattaatccccagattagcctacaaaatttcacgccatcgagagtgagctatattcaatatcacttcacccagtgcttcattccatgaatcaacacagccgtccaccatgtactctgtgcagagcttctcaggcctttactgactccatcctggtttctccttgaaatcttcagttttcatacttagaccctgtacatgggcaattagtggccatttgcaaatttaataacacatgttaattatgacaataaacaatatgattcatttctctcctccacgcaaatgactaagttctaaactatgcagagcccaaacaaggtcagacatgaactagatccgagacttgcactgatttacagcagaacactgactgcgagagacacctgagaatttgtgcattacctgaagtcctaaaagcccaaaaagagcttcttcatactgaaaactctggctcaaaatcaaacataacccttcaaaagaaatctccatttttaagcaggaagaagtgatatatgcacaattggtacatgagggtgtgtccctgaaaaatatgtatgttttggattttggctttattattttccttttatgtgaaaagctggataaactgggaagaagtaagtgaaaatgagaagacttaggcaaagcaatgagtgaaaactttcaccatacaggcctttccatgtcactaaaaagcaaaccaaagctcacagctatgaagttacttgctgaggccacatccgtttggtgacgttacattcccttaacttcagctctcaggcgagatgacgtgctggagggggtcagactggctttaacagcaggatggaggggacatacaggagtgcaaacaaccaacttaaagtaggtggcctccatcgtacttctgccagttcacagatcctttcttaagtaaataaccagtgcccagcagcagatcctataaggcaaaatagcatacatttttaaaattttttatgagaatttgattgactctgtctcttggtatttaactacctttgtatatattaccagtaataaagcccccttagtaacaaagtccccttagatttttaattgctaaattgcctttcgagtaactatttcagtctttaaggaaagagaagctacgggaccttgatttcggagataggagcacactcttggtgttgttttagttccttctaatcacaccctatttgcaccacataaacattagcacaactagagatctggttgaatcacttacatgtcattccagacagtaaaactctaatcgtgaacattaatttcactgatgtagttgcagcttagtagggggtcgccaccattcacttacccaggcttgaagttatctctaatttagaggttagggacagtgacacaggaaagaggctctgtgctttatatctggagatgtgggatcataaaaacgtctttttaatctgatgatcattaaaacacccggtgatgtggcacagctgctaatcggaatacatttccatttctgcggggattgagcatgtcttcggaaccctctgcaatagctttagaaacaaacgttccttttatcaggtgagaaaactaccctatggcatgcctccggatatgtagttcttcctaggctacaaaatatcagaggttaacttcaggcaaaatgataaaactagcagtagtatttcctattactatctgcagtttgcttcaaaatttcaaaaaggtttcggaaaaatcactaaatacgaagggcacacttcattcatttattccaaggaatctatttggtgccagacattgcatggaattgtatggatttttaaaatgaaatgtgggctctctcttaagcagaccatggcaaggaaacttgaaaactccgacgcatccaggggacgagactcacattttacatagagatactactcgggattcacaaaacacgacgtatccatgacgctcgttcaacactgcatttttactcatggtattctgttctctttcattttaaagtgcgtgtcatgacccactaaattgatttctcagctcacaaatatgtcctctgaaacactggtctacaggggaggatttatacgggcaaataggaaacaaaatctccaaagagaaagcatcagaacaagaggaggttgtcctcttgtgtgctagaagccactgtgtgccttatcctgcacagtaaaaggatttttcaaagggcgtgatcaaattatgttttggagtaactgtatcagaatagctatagatatatagatatagaaaggatagatttttttcttgctatttctatgttcatttacatgtgaacctacgtactttagaaatgattaatctggctgggcgaggtggctcatctcaacactttgggaagccaagaccgtccgatcacctgaggtcaggagtttgtgatcagcctggccgacatggtcaaaccccatctctactaaaagcacaaaaagtagccgggcatggtggtgtgggcctgtagtcccagctacttgggaggctaaggcaggagaatcacttgaaccctggaggtggaggttgcagtgagccgagactgcagcactgcactccagcctgggcgacagggcgagactctgtctcaaaaaaaaagtgattaatctgggctgattaattacttaagaaattaacagctaggctaggagaagggaaaccccaccaccgacctgcctggccacctcatggtgtcttcctgtggtccctggtgaagtgtgaatccactggaagcttaggctcagcctttctctactgcgtcccagtcatttgtccttcctgagtgactggcacctgccctgtggcccatcaggggaaattgggtcacgtgagcacgtaaagaattagtcactccagccaatctaccaccagaaagagatgcaaccgctacggctatcaaagacacggtccatgtagctcttccagaatttcgagaagaatttgaatctccatagatattttaaatttatttttcaaggcctccgagctcctggctgggagccagtgagtgtgggcaggtgggctatgcttcagctggtgtccacaggtgctgccacactcttattaaaatatggaaatgtcttgatgccagctggtgcagggctgctgccctgagctctcaaggtccccacgtccatcccaccgccttgggtggcctggcccgggcctgccacgtttctccttggtgaaatgttgacacagcaaaatgctcaaggtcgatgactcatgctcgttccgatgggccctggtctgtgtctttttttgttattaagtactttagatgggtaaattggtaatgagttctgagcaagggatttgaaaagacctcacatccaccactgctgtaatttttctttttctttctttctgttttctttaatttttgctgtttcttttttagcagaggacaggcaccactagcttaccatccaggctgtaggtgtcaccaacacgaaacactcccaacagaagagcagggacgttatcttctcacctttgccttctggggaaagtgaggaggaaccatttccctccaggaaaacatatgttgctgacaccgaccgcgtacttggccacacatcgtggctcaggactcctggatttacgttaccacctggcattgaggaaatgtaaaaataacagcaatataaataacctcatgacctataaaagtatgcatgaggaatggggctctgggccaagcaggcatgttgtttaggtattgcatactcggctaattatgaaaaaaaaaaaaaaaaaaaaaaaaaagctacccaagtacaagaaaaggaaagggattgaagtgattttttcccctttatggcagggacagaataaatgggcaaaaaaggattcagttagttaaatttaaaaggaaattggcacaacttaattttctgtgcatttttgggtactgaaaaccttatttatactgacagtcattttttagctttactatcaatgcattcttcccttgctcagcacatatgttgttgaagacatcgctctgtttcctacttcagttggtgttttctagcacaaaccatctccttcgacttggcgggggggtgggtgacaagagttaggagtgaaggaggagcagacatttccattcctccccgcttaacctggaggataagtatctgcggcactcgctaccagagaagaatgcttaaaacataagttcaagaggaatttcgatctactccagggtggtgatttcataaggggttattaacaagtaggaaggaatgtcgggagcccagcccgagacatttaaagtcagtagagggccgggcaaatccagtttctcagcacacgcaacctttccaaggtctgcagtgatgtatttttctgtttcttaagtaatcaatgcttatagaaatatgacctgtccacatagtgtgggtaacagctgtgtcacaagagtaactgcctgggaacccagttctcttcccagatctccatcaccactagactcagacgccctctcttgatatatttctgcaagcattcacaaagggatgataaaatctgttgcacgttttcaaaaggcaattagaattgtgctgttcaaaacatgcataattgcagtgtgtcacctccatgagtttaacacatttcccctgtagcagtctccactctcctcacatccacccatctccactgaactctctcttcttgagtttcagattagcctctgtggttctttacatctgaaattcgtctttctgagaggcaataacacaaatatttggattatgctatcatggaaaggaaagaaaattctatcatgtaaaagaaaaaacatattatgtaaaagaaaacaaatcacttcctagaagcttataaagtaggatgcaggtcgacttgagaggggtgtcaaagccctgtttgcatttcttcctcatgtgcagtaatacagggtttcagagaaatctatattttagagatttaaaaggagttgccctgtgtaacacaaactagatttggtttaacacaagctagacgccaatttcaggtcgaagtgcttgtatccaaatttaattacgcaccatctatgtgtatctgcaagcgctgtcgagctgcgacttctaaattttacaaacgagaacttgagaagtggtgggagcctgccaggcacctctctctgcatttgtacttttccttaatgccaagtaggaaaaaacaagcacattcccttcatgcaatagcctttctgaagaggaattttcctatagagtttcagaatgagttatagccagtatgagtaatgagtttaaaatgtattttcacattttttatgccttacatagcactctcagtattaagtcagccaaacagctatagtttgtttttctcctgcgttactgaaacccggatcccatctcataggattctaaaatacactctaatctgatctctagcgcaggtacctaagagaaaagtggtgttttcagcatcttgttggggaaacattccatggctcctttctctcccctgcttcctggcctttccccagcactgacgctgtcagccgccctgcgtgccacacagtcctgccctctgccaaggctcctggcctgcagcccctcctgcaagcccacatctgccctcctgcacgcccacatctgccctcctgcacggcagtcacctgggcgtcccctcctgctacctcctcacactcgagagtgtctcttccttgaaaatttctccttcctgagagatttttaagtctctcctagctgtttcctttccagtcctaataaattctcttcttcaaaaaattgccactcaatttaatcctcaggcctgcggctgtcacttcaaagtcaacaagtacaaccccagatgcaccctgctcttcaggtgggagctgctgctctgaaccacgccccagctgtggtccccatcaggtcccagttctcccgctcagtgggattgaactcagcttcctcctgcctttccactcctccttctgcttccccagcctctcccctgactctctttctacttctaatctctcctcaaggtccattcagctgtatactttctttgctagattagtatttacaaaaaaaaaaaaaaaaaaaccttcttcttcacagcatgcccttgctcaaaatacttgctggaacccagtcctgtgatgctcatagactccaaagctctctgctcccacttcccggtgcggaggtgtgggcagagccagcctcccctccctcacgagtgcagtcagctctgcctctgcggcattcccttccttttccctccccctctccacattccgtcctcaactcaaaatccactgcttcttcctcctgcctacacaacaaaggctcacctggctgctccagcccactctgacctctcctaagaattcctagagcattttgcagagctcccatcccagccccctggccctttgcaaccttaacacatgccttgaaggcaccttgaagacagtcccccttagagctgagtcaccacagagaagcctggggaaaagcaccccttagaatgcaccctggatgtccctgtcacatgggttggcattataagtgtcaaaggctttaacaagtgaataaaaccgtcaaaattagctcagctgagcaggatgcgagtcccacagtgatgcgtcagattcttcattcttctatacccctcaggatagatgtagtcccttttcttcttgcacttacccggtcgtcataaattcttgtcatctgccgtgctccataacccctctaaaatgtgagcactcaatggattgtttctttcggacgaatatttctttaagttctaaagtaaatcttagcaccaggtttggaccttgtaggacgtgaatacctgttgaatcagtggagagctccctagcttgggggaggaatatagtttgctcatggtccacccctcttcctttcttcttcattcagctctcatgttccccagagtggccactgcgctccagggcatctctttgccttcccagggctgaaccacgtgctgtccgttctgccaggtttcttgtcactcttggtttggagcaaggactcatcttaactcccattatgctccctgtctttctccagctctcccagaattattcaaggacatttctctctccccactaagaaacgtctctccactcttgcagagtttttgcattcttccttaagagaagttcctcttctcgccttccatcctacctccccctccctccacaaaatccttcctgtgtctcctctcccagacacatccctgatgttaacttattcatacctctcctgtcatggcaaacttataaaacagtcttgttactgtctgaggagttggacttttcccataaaacatttccaaggtgagccggaggtgacgttgcctttgtagtctcatccagtgacctcacacctatttctcctcccgcctgtgaattactcaaaggtaaagatttcatcatgtagattatggctagaggctctatgcctgagactcattttggtttttgtccagagattgaagcatatgcaattggggaaaggtgagcttttttaaaaaaataataataaagatgaaaaatgaacatttagagagttaagtggacatttattcaaaatgagaaaataaatcaaagtatacgtttacaaagtattacaaatgttaactgtttgtacattgcttgagtccctccctcggccttggaagaggcctggggaagataggggtgcatggaagccccttcacgtaactacgggtcaacccactgtgcccactccagtcaccaggattccagagtcacactcagcacagccaaagcatgccaacattcatcaaattgctttttatctcctgatattacagattgtaaagcaatgtaaagtacaattttaaaaaactatgtatggaccttgtgtctttgaattctcaaaccatgggtcaggaatcagtttcaaacaaccataggtcctttctctcataagttaacaggcttaggtagaaaacaaacagctccactccattgcataaaagaaaatattcacctcatgcaatgagatattttccttatcttataattttaaataagtaaagatcagcactcaaaggtggattaacactgaaagtgcttccgtaagttgtcaatcttgtgtgaatggggaaaaatgatcattgtggtgcgtggctttactgtacttatttgcataaaattttcatttagtaaatgtgcaagctattttacaggtatggaaagtgtagctcctttcagaaagagaatttctatagcaacattattaaaactaatttattgttcattcatcttttttctttttcaacaaatattaattgagtgccatctgtgagccgggctctattctaggcactgaaaatacaacgcacattgtatttgcccacattccagaggaaggagacacaaaacaaacaattgggctgttctgtgccatgcagtgagaaggactgtgtagaaaactaaagcaaggagtggggacaggaactgacctggcgaggaagacaggtgctgtttttcagaaggtcatccagaaggcctgaacacagtgcagctgccatgccctgctggacgctggagaaggagagagaggctgggaggctgacagggccgggaaggcaagaccgaggccaaggcctaaggcgtgtaaggggggctggggcccaaggccagcaggagtcagggcatgcaaggtcctctcagcctcaggaagcctttggatcttaatgtgaatcaactcagaaagcagcagagaggctggagtcgggaatgacatgatccgacttatgttttaaagcgaggtttctcggcctcagtacaatggacattctgagctggatactataattctaggttgggggaccgtcctgtgtgttataggatgttttgcagcatttctggcctctgctcaccagacgtcagtagcacaccccatcgcccggttgtgacaactaaaaatgtctccagacattgctgaatgtcccctgggggtcagaaagcacctcctatcaagagccatgatttaaaacagaatcacattgactgggagtgatatttcagttatataaaaactagcacaagacaaccgaattttttgtatcaacatttagagatttgctctcgctagattaaaattcaccttaaatgtacctacactgcaaacttgtaattaataatcatatcttaatgcaaaggccaagactttatttttgagtcagatcctgatgtgattcaattctctcgtacctgtaaaaatagcaccgagcccgaggtcacagagaaatcttgttaataggccaaaagaaaacactgcaggtgtccaaaccaacccgtgtttccatggacccaaccacaggatgccactgaactacacaaccccttacttcactagatacagaggcacaaaaatgtctcagacacacctttaaatattatacaggatgtacagtattcacttccttacttgtttaactaaattcactgagagtttcaaatattttcttttgatgtgacttttcttcattctcagaaccctgctggccactgcttgaaggcatgaaaagtcttgatgactttgtttgcactgtattatttctaaaattctcctgaaagcatgcatcatgtatatgcacttttaacaaagacctcttcagacttaatgccattgtcctcttgatttctgattgttgtaattccctcactgctgaagtgctgggtagtgggaatgcttttgacaaggaatgttgtgtgctaagctaccactttacgggagaacccaaccatccagagtttctgcattcaatcctcagtgtgttgaatctagaaattaacaagtcagggcacggctgctttcacgtgtttggatctaactgggagaagggtgtttatgagcggaggctgatgcataattcagtagaatgccgcggctactacaagcagaggagaaccccaaagtggggatgtcgatactgaagccgcagcactattgcagctgccagagtgcagctttgcaacctacagttttcagttcattaccactgaggcctgggtggtaaactcgtcacaggaaagaagctgccatatcctatcctttacatcaacaaatgaaacagtgaaggaaaactttacatagaggagccaagagtaaaagaatgactgtggggggactgctgagccctctgggcctcagtctgaatctggctgccttgccatgagttgtgaaatgtttacacagagattaacttccccaagcctcaatgatctcatctcgaaaataggtgtaatagtgacaactctccagaattgtcatgagaacagagctaaaccaagcaccacatctagcagggaattggcacctaatatacacctgggtgatggtaactattgtaagagcaatgtgaggaagtatcatgctgaccattagttcttatgccttacgttaagaagggccttttcccttattcccatccagagccaggcttaagtagataaatgtttttaagatttaaaaaattaaaatttaattataaattaagatttaaaaaactaaaatttagcagataatttaaggatttcagcctaacctgtgtgaccgtttaaaagcatgtcatggtggccgagcacagtggctcatgtctgaaatcccagcactatgggaggccaaggaaggcagatcacttgaagtttgagaccaacctgaccaacatgatgaaaccctcactctcctaaaaaatacaaaaattagccgggcatggtggcatgcacctgtaatcacagctactctggaggctgaggcaggagaatctcccaggaggcagaggttgcagggagctgagatcgtgccactgccctccagcctgggcaacagagtgagagactctgcctcaaaaaacaaaacaaagcccaaaaaacatgtcttggctatagtttaacctgccaattgaaaaatagaaatacgtttaaactttaattgcaaaaatgagaattttggctgcaatttaaatacatcagttgatgagatagaaatcagttgtgagggaggccagcctgaagtactcagactgagagtcagcaagtgccttagaggattcgtttattgccaccaggtgtaagaggactgtgctcattcaaagccttggggaagccctcactgcactgagaataaaacctctcagttcctctttggtggtttcccaggccctgactcattagtacctggttccttgaacatggtgagctctttcctgctttggggtatttacacatggtgtggaggttgcctttctaaaatcacgagctgaaatgcaacctcatggacctcacccaccttgcctggctgcccaccagtgttttccacttactaggttttccacgtagctgtgagtccaccacgtttaattatctgcttgtgtatctgcttgtttattgccaatcacctttttgggagagaagctcccaggtaccaggcagtggtattcattatgtatctcccgcactcagtgagtatctggcacatagtaggcacccaataaataactgaattaaagagtgcaaaaataaaataggtgaaagcaacataaaagcaggtgagtacatcttgagccagttttaaaacagaacctgttttactggcattcggaagcttaacagaaataaaaaaaagccaaactagagttgaccacattgaataagtattctttcagtttcagcccattcaataattgctcattgtcaagagctaaaacagttaagatcacctgactttcacttttgttgccattcttgtacatgctaacttgactgaaggtctttgttttttatgtataatggagtcaggagccacagtggctcgctggatcatttaaatttaaactcttctgcctagttttcaaaatgccgatagttttgcctttattccatctatccagcgtttcctgctcataaatcttgacctgctttcctttctgggcagaacaggctgtgctctgtgctgtaaaggagaggtccctgcgggtgatctgaccaaggtcctgactggtgggtaggaagacttggggttgatgcgggagagggcttgagtgcaccaaagcaagaaaacaggagtcaatatggagaatttggataaacatgcattgcttgtagtgctatttgagggtatgtctcgagaggcaagaggagataatgtcaaggtaggagttaagagggaccaagtcaagaccagccttgagagataagctctggggagatggaaccttcccttccttccttccttccttccctccatccctccccactccctccttccctccctccctcccacctccctccttccctccctccctttctttccttttttgctttctttcattgttttcctgtcttcctccctccttccctccctgtctccttcctaccttctttctgtagattgcaaccaacagcagtttatccaaaacttttcagcatggaaatgacataatccaatttgtcttttaatgaaaaataaagactgaataataatcagaacatacaggttaaagttccattctatctctttccaactgcatgactctgagtaaccctaattccttcttcagcaaaataaggataacatctctgcctatggaggtaccggtgattgggattggggtggtaatacaccgttctgccatatttaaagtataataaagcaaatgatgtgtgttgtcccattcaaataatttattagtctaaatctttagaaaagcctaactttaagacagtcagaatcaactgtgtcccaacagaaaagaaccaaagtctcacgcatatccttgatgctgaatcaaaagtctccaataggttgcagcttttttgaggttccttaggaagcaagagccaatcccaggtgcacctgtgaagtcagagaaagggaacttagcagaggtggtgatggggggatgtctggccccttgatggcagttgtgcctgatttgcaaagtctgattttgtgcctaagggtaatgcagtgaccatggggaaacctacctccattggacatttttccaaatagaagcatttgctgtgtttcactttattaatattacatcactttaaaaagtcttcatcaggcccttcagtggaatttggacagtggctttcgtgttcgtacctctcaaaacacttaacataggacaagcattacatatttaagtaattatcttagtgtgcagaatgcggaagtcgggtattgaagttcagtattccaacatggacactaaaagtgtttatagtgatgttgaaaatatcactatagtgtttcttatcactcaagtgtttcttattttttccaaagctgtaagattgccttaatttatttaaatgtaatcattcagaaaactcctgaaacatgaactcattgctttctcatgacaggcaatactataatgacaagttatttgatctatgacatcaaaaattctttataaatatgtttgaatgcaacaaattattgttaccacttgacattttcctttttgtttgacattgttgtggcaaaatttggtgaatattatataggctacaaattttattaaagattattattattttaaatgtcatgaatgtttgatctgatgttttattattttctccaaatgttttattcagtatattcagtacatgttatcagaaaataattatgttttctaaaatttattttaggttttgaaactaacatgaacataagtagccgagatgaccctagtacgtcagaaattacttccgagactcaagacagaaatgcaaataaccatggaattcagttatctaattcactatctagtgctataactgctgaaaatggaaattccatctcaaatggtaagcactttttaaactcagaagtaaatgtacaaaagttttaggctgtatcaactttctgggaggaatggatttaaaatatgaaaatgaagtagggttaagaactggaaaatagaatataaaccatgaaactcccctgcaagtattattgtcagcatatgattgcttcagttaaagaattggaattctattcactccttgttgacttttccgaaattttatggagtgttaatctaaaagaactggtccaaaattagtcttatactgagcagaagaaggcaatagattctctaccaatatttttaattaaaaaattattctggaaactaagaaatgtgaaggaaaataatattaaagaaatgataagtgccagactggcttcaggtattttaagtacatcaatgagtgccacatttagaaagtggcttgattgcaggtacaaaagctgaggatcacgcaagtattttctctcacaaataaaagaagacaaaggcgtctgggaataactgatgggaagactcagaccaactattcctgagggcctcccacagggctgggaaaagcatgtttgtttagtctaattagaggcgtgggagaaccatcatgatgctgaaatgctgggaagcagttgaagacctgggagtggggtgcaaggtgagccgaagcaaggaagcccacacttgaagcttggctcatggggacataagggtacccacattgttcagagaaggcagctaagaagtcaagttgtgcttctgactgccttctcaaattacagggcaagaaactgagtcgtggccccaccaaggccttggggtggggccttcaagtgttcttcccaagagtcagagtgaaccagaaccaagaaccatgttgagttgcccagatgtaaccaggcctacaggtacctgggagaaacacgtgtacattttccccaaagggcagtaatagcatcctaggcttcaaaacattcatagaaaccatttttcaaatgcaaagtccaacacagttagaaataaccaggcataggagcacacaaaataagataaaaaattaaaagcagagacggcagccaattgcaatatgtccacagggattcaaaaggttggaattcaaagacacatgccttaaaataagtatgtttactcagccccccacgaaataaaacaacgagaatttcagcagaaataggaaactataaggaaatcgtcaaatggaaattctgaaattggaaaatgcagtaataaaattgagtacaacagaggataaagttaaatttaattagatatagttgtttaaaaacaaaacaaataaaaaataactggagaagtggaagataactcagaaaatccccagaatgaaacagattgaagcaaaagagaagaatggaaactccagacaatggtttagagatataaagggcaatgagaaggatgattgaagtcttagggaaagaagagggagcgcatgagcagaagaaagacttggtgagaaatgttagagcatctcccaatgctgacgaaagagcaccaggaaacagatttaagttggcagatttttataacattcaacatacattcttcacgggatccagcaatctgactcctcagtatcttcccaagagaaatgacagcagtgtccacacaaacacctgtatgcaaatgcatatggtgacattattcataatcacataaaactggaaataaattcagtgtctttcaactgatgactggcttgtattagtgatccatcactgtgcaaaatattactcccaaaacttggaggcttatataagaaatggttattatttcatagtttctgtgggccaggaagctgtgtgtggcttagcagggtgcctttggtttaaggtcccccatgagacagcaatcaagctgtcagccaagaccacagtcatcttgagacttgagtgaaggctgatccattttcaaggtcactcacgtggctattggcaggccacagaaggttcacatccaagtcaactcacatgggcagcctcccagcacagcagctctccccacatccctgagcaagcaatccaagagagagcaccccagatggaggctgcagtcttcacataacccagtcttgaaaatgacaccccagcactctgtcacgtttgattgagtcactaaatccaggccacactcaatgggtggggagtccgtgagtgcctggaggtgggctcaccagcatctcacaggctgaactagcacatggatgaagcctgcaataaataagagtgatcaactataatgagcatcataaaaaaaagggatggctaaagcattgtgttgaggttaaaaaaaaaaatcaaaagactaagtgtgatcctgcttatgtaacatttggggaaaagcaaagctggagacagaaaacagctgagtggttgctggaggctgggcgtaatggcaggagatgaagttcagaaggacatgtggtgttatagacaacctggagtgctcatgtctgcagatgcacagatgtgtatgtctaaaaaaggtgaatctcactgtctctaaattacaccataatcaatccaacgtttgtaaaaatgaaacagaaacctttgcaaagcctaagtaggatacataaaactttcctaggtgtatcatagtaaaacacctataaaataaagaccgagaattaattttaaaagcagttagaggtaaaaatatgtactatcttcgaaaagtagcaactgaagtccaaagacaatgaaataacatagttaacatgctcaaataaaataactgccccccaaaaattcctgtaataatgaaagggagttaaggatatttttaggaaaaaaaataaaaatgaaaggaattaaacactgacagactcagaatgcttagagataaaggaaagaataaagaataactaaaaaggcagtaaaatttggaggggtaaaataatatttaatattatacactgataaacctaccttgccagttgtaacctcaaaggtaacccctgaaagaatattagtggggtagataatatccaaactagtaaagagagaaaaataaaatcataaaaagtcaactcaaaagatgcaaaaaggggataaaataggaaaaatagggcaaggagaaagttctgagacagtagatatgaaaacacatgtgaaaataaactttatttaattataataaactttaaaagacttatttaatgtaaacttatatgaaaaatgattagcagaatattttaaaaactaagttttctgaaaacagtaaaacataaggattctgaaagagtaaatgtaaagggatagaaaagaaaaagatacaatgtgcaaatattaaaaagcagcaaaaacagtgctcatatatttgaacgtcaaaaattacatctctaggccaggcgcggtggctcacgcctgcaatcccagcactttgggaggccgaggcaggcagatcacctgaggtcaggagttcgagaccagcctggccaacatggtgaaacccccatctctactaaaaatacaaaaatcagctgggcttggtggtatatgcctttaatcccggcgactcggaaagctgaggtaggagaattgcttgaacccaggaggcggagtttgcagtgagccctgatcgcgccactgcactccagcctgggtgacagagccagactttgtctaaaaaaataagataaaataaaatctctaagtaatcaatgtattcaagaagaaatcacaaaataaattaaaaagcaaaatattttaactaatgacaatgcaaatatgacaacagaacttttaggacatgtctaatgtcttttgtgtatgagtggaaggggctcgggtactgtcggtatggtcaatatgtggctgtatggcatcgtggccatggctgggcttttagtgtccacatcaactgaatagtatatattgtcctgattaagtcgtttcatatgcttcattccatcccatcctcccaccttgccacccttctgagtctccagtgtctattattccacactctgtgcccaagtgtacacgttatttagctcccacttataagtgagaacatgtagcatttttctttctgtgtcttagttatttcacctaagataatggcctccagttccatccatgttactgcaaaagatctcttaagaaatggaaatgtatggcttcaaacctttgcatcacaagagaacaaatacgatgagtgttaaaagggtctagaaattagaaacagaacaaaaactaaatactacgaaaatggaaggaaagatatgatagtgataataagaacataagttattgaaatataaaacaaataaaataatgtgaagggatagaaaggaaggaaagagaaagttgtttatcttttaaaaaattatctttgaaaacaataagattgaaaattttcttgcaaggggatagagaaatagagaaaattggcacaaataacagattttagattgaaaaggggacatcaatacagatctggctgaaattaaaaatagtaagagaatattacaaacagttttacaccaagataaatttacaaatttacataaacaaatacattcttaaaaaaaaaaagaactaacgaaaatggacaaaagaagtaggaaagctaaataacaccgtaaatgttaaattaatggaatttgtaattgaatgccttcctacaaggaaaattccagaatcagatggtttctccactaaatgtttccaaaattctaaggattaaataactccaatgtcacgtacacgctttcagagaataggaaggaaggagaaagaaaataatattactccagcttgcataattagccacttaatttatgacaaaattggcatgtgagagcactggggaagaataattgattgctatccatgtggagcaaacagtgaaactcgactctgcctaatgctatacacacaacaattcctgatagattatagatctgtatgtcaaatgtcaaatcataaaatggatagaagaaacaataggagagtatctttcttacttcataaaaggaaagaagggcttgttaagcaagacacaaaagttttaaccataaagaaaaaagaaaaaaaaaacataaatagggagaaaatatttttaacacatttacccaacaaaggctaatattcaacgtttatttaaattaaaaacaaaagacagctgaaaagaaaattggacagaatatgtgaataccacttagaaaaacaattttaatggagtccaacctcattagtaactagagaaatgtaactgaagactccagggcaatactactacacacactctagaattacagacccgcctgaaaaggaagaggtgctcggagaacggactgccacaaagtgaggatggcaatttcatttggaggggaaggccagtagcgatttggagagatgactacaggagcttccgcagagctgccagtgttctatttctttattttatttgtgtggttgttacaattctgcaatttaaaaaaaaaaggaggaagaaagagatggagaaagggaacttctcttcaccaaaatatttaagttttctgtgttttgaggcaaaaggcaaaaactacagcttcggaaatgatcctaaaaaacttaataataataataataaaaacggcaagtcatactctaaatatcaaaacataaccaaaaaccaaggaaacaagcagaaaccctctagaccaaaatggagatgtttgtgaaataggatccatgaaattaataatataaattctttaggagtatcagggttctaaacttcagcatgtaacacatagtgtgtacggccaaagcctgcaacacagatttctgtgttctcccttaacacacttacaatttttaaaataaagttggttctatgctgtcattaagtaaaaaccacttgaaaatctcaagagttatgcgtgcaaaaggaaaattatttcaattggaaattcaatctttcaaagcaacttgacacatttatgctgatctactcttgtgagcgccatgaatttctgggggcctggaactttccccatgatttttaaaacatccagcacaataccctttatacttaggccctgagtaagcatttgctgattgaaacaatgttgtttgttacggaggaaccagtaaatcccatacagagggcagagtcagaaaaactgcctcgtcagtattatagaaattgaacaaacattacacatgtgcagaatgtgatgtatacatgagcatgataactcttaaagcaattattagtacaggttcataacttacaaagtgcagccaatgcactttctaaataagggcacaagatgaaaataaatgtttaaaataacttaaagttctaattgaatcagaaacagtgttattttctaggaaacatttctcttttgaatgccagtatctgcatgctacctctgcttcccagaaataattatctgtttgttcatttgttgaaatatagttatgtgtgcgtaattatagctatcacttactttaattgccatccttttactgatgcgagcgcagacttggatcttttttttgtatatttaattattccctggacttgtggttatttatcattagattagagagcagtttttagtgttagaacattttagctttatcaaacaaaatattgtgaacataaagatgtttattttgtggggacacacagatataaaaaattccaactagggcattttatgttcagtattattttctttcttgctattcagtgaatacacataatatggctgggtatcaggaaaaattgcaattaaagaatacagacattgcgtttgcatttacatttatcattctgtatacgttgtctatttttaatttgcattatgttcatcctcaatgcacaataagggttatttgtgttgaataaaggcttcctaaggcaaaaggttgggggccatcatttgcaggaccaggaaatctgcattctgtgctctgactccggtgccttgttgaacttaggccattagggcgccaaaccacaccagttctgggaacatctaagaagggcttccatcagccgcacctcgaaatcaatccaaaccaccagccaaggagcctttggttggaacccataaatatctttaatatgtattttacaacatcactttctttatggagattgtacaccttctttggaacgcatacccttgtctgactgaaagcctaacagccagagaaaaggaagcaagcctcacttgacaatctggaatatgttgcaatcatctattttaagcaacagaagttacctttgcaaagaaagaaaactcctggggcatcgagtaagccctgccccactcatccttctagttaaaagcattttaaagtcacattaaataatttctaatttggatattatttaattacattttctccactgcagttgagaagtcagtattgaaaaggaatagattgaaatgctcagtctggtatttccttgcagtggaatagtgttcccagtgcttaaggcatcattctgcctgggtttgaagctcacctctgatgcttattaactccccgaccatgggcaagttacttaacctctctttttcaattttctaatcttaaaaatgggaataataagagcacctacttcatggactgctgtattttatatgatgaaatttagcagaaagttaatactcaagaaatattacctatacacagttattcataaaatattatgtgttttagagctagaagagtcatgagggtttatccaacagaaacaacaattacatgaatgaggtagatggaggtgcaaggcagtgaattcgtttctctgaaaccatgcaggctgtaatagtagatcagtgctttatgatattttcttagacacaaatgcccacgtgtacagccaaatacacaatattactttgatggcttgtgctggtattcagggcaaagacagacattacaatttggaatctctgggatgaatagaagcaggaatatctgggtggagttcaggggaagggtctatttaatatctaggttggaggattcaaaataatatgaagggcaggatggcaagaggaaacccagtgaagagagaggtgcacattagtcaatcaaaacacttaccaagtgcacctgtcacatgtaggcattgtgttatgcatgggagccctatgctactacctaagcaacacaagatgacctctgtgtgtgaacagtgaaaatacggagcacattgaaaatacataccaaggagactgcaaaataaggcagtcagcaataatgtcaaatgaatcccataaataatgattactctgttactttccacatagataaaagagatgagtctggtgggctgggattgctaaggatgcttcatagagaaggttgggattttcaaattgagtttaattcagaaaagaaaggagcacatttccatgaatttgctgcacaatgtattgtggcagaaatgtgaatcagcttctctgatagaataggtgagtaaataacagaggaaagaaacaattatgtaggagtctacagagccatgaatgccaatttaaagagtgtctcggccgggcgcggtggctcacgcctgtaaccccagcactttgggaggctgaggcaggcggattacaaggtcaggcgatcgagaccatcctggctaacacggtgaaaccccgtctctactaaaaatgcaaaaaattagccgggcgtggtggtgggcgcctgtagtcccagctacttgggaggctgaggcaggagtgaacctgggaggcagagcttgcagtgagccgagatcgcgccactgcgctccagcctgggtgacagagcgagactccatctcaaaaaaaaaaaaaaaaaaaaaaaaaaagagtatctctgaaagggttgtccttgttttgatgggggggggtactctctgctgttttggaaaagtgtacctgattgtactatccagggtgaacaatagaattggaaactgagtttgggggtgccagttttgaattcattcactacttaagccttggcaggttttgtacatgaagcaagagtattaaagactgtattggtataggagtcaagaagaggaaggtgtcaagaacgactccaagaatttgaggcaaatgatgggagaatacagcactcttaagaagggaagggcaattcccaaaggaggttaattctataagcggatttggagctcaagagaaaaggacttctgattatggatgatttttccataaatgatgatgacaggtttggagtttaggccagggttccaggatagaaagagaaaagccagaattttcaaagaagctggagacatggtggttatttatagcatcagaggaacaatcataaagagaaataagaaaagaaatatgaccactaaaccactcagaatgccaaagtttgagaaatttacattgagaaggggggaaatggagacatacaataggtgctcaagagatagaagacagatgtccaatttcatggaaatcaagagggtagtggatttaaaggtgatggaatacttggaaagctggacagatgtaaaaagagaattcaaaccctcttgccattgactaaacaagtttgggtccctacaaaatgacagatttgactaatagattctaaccggtcagccatgtaaaattcagtgccataccccccttgaaagtctctttctcattcttgtcttgtctttttttttttttttttttttgagatggagtcttgctctgtcgcccaggctggagtgcagtggcacaatctcaactcactgcaaactccgcctcccaggttcaagtgattcttcagcctcagcctcccgagtagctgggactacaggcgcatgccaccacatttttttttttgtattttttttagtagaggcagggtttcaccgtgttagccagaatggtcttgatctgctgacctcgtgatctgcccgcctcagcctctcaaagtgctggtattacaggcgtgagccactgcacccagccctcattcttttctttttataagaatttacatgaacccactacgctctgcatgtagacctcatggccccagagtctgccacttttcaaaattacttctttaaaaatcacacagaactccagggaccaggtctacaccacagtgatgaggaggatgtcctaaaagccattcctctttgtgtcctggaggaaggtttaactttcagtgctctgagcagcctccaattcaggaggagagggagaacagaggctgcttcttcctgctaaaccttcaatcaaggccaaagccttttcgacttttgcccacccaagtttgaaggagcagcagcaggttctatggagtgtccacagcatatccattatgccatggagatcagctttggggaattccttcccctgaacatctgcatgttttctttgagcagaagagctggctatctggagggtagagtagggtggacgcagtttcagaagaccttgatttgctgtcatttgggcaagaatggctttttgaaatagtttggtatcataatggaccaaaagctcaactttttgaagcacactattgccctggaaagaatgtgttcagcaagggacacatgaatctctaagctgggaattgttaactccaagcctggtctggggagaaggctgctacagtaagaggagcagtgggggcttctcagaatgtgcagaagctccttctcagacagaattccaccttttaatgaaggcacagataaagagctccatcttcactttaaatgttcctccaacacgattggagtcttcaccctggttaaaatgcgccgtgggattctctacccacgcaggactgtgggacttttctggaggcctttgcttagcaatgttccctttagctgcgtgagaaaatccttgctatgttaaaaaaaaaaaagttcttgtcagttaaggacacatgtacaaacatttacagctgaaatgacatgatttctgggatttaagtgaaaaatgaataaaaaatggataaaaatggataaaattgacagccccaaggcttggaatgggtgcatggagtttcactgcatattctctttatgtctgaaatgtttgtaataaaaagttttaaaactgtgttattttgatagatagaatgaatgttacgtagtctcatatccattacttggaattcttaatgaaattgaatatgtgtattacttattagccattcatattttcatattttttctcctttattttctaaacttattctttgtccattttttaatatctgggatctgtaggatgtttgaagaattaaaaaagcctcttatttaatatatttcaatgttctacattgttcttttaaaatacacattttatttttagggcattgtcaatatgtttatttttaatgtttatagagagacatgaatccgttttctttttttttattcatggtttgtgcgtttggtgtcattttaaaataatttgccttaaaaaggtactgcttctaatacggcagctaaataaaatattgtgctggtaaaaaaaaaaaaaaaaaaaaaaaagacctcctttgcacctttggcgcttcctggccgtcactttgtcccttccagttctcaaaatgttactgcgttggccgtgatgaggacccttggcctgtttgctacaaccttcaaaaaatccccttccctctgacttctcgggcccagtcgcttgtcccaccccctcctccacatgcccgtctcccccagcacccactcacctgcctccctccccgctgtcctcacctggccctccacctgcatgcgaccacctgcccaagctgccatatgtccctgtctgtggagccctgacacaggttctgggacccattctttctttagtcaacagttatgaatgaaatacctttgaactcattacttagataaaatggtgtcacttctcttctgggaagtctgcagtgctacctatcgtctccaaagtgtggtcacatttccgcgaagcgtccttgtgttttgttgccttatcacatttgtgctctcagccaggcatgtccttctcgactttgttcgccctccacaattctcctcctcctcgaaggcccaggtcctttagcaacaccaccatgaagtttactctagtccgttccatcagaatgcatccttaccttctccaagaccctgttcaacgtgacctgtactcctcttaatcctgaaatcatgctgctgtgtgtttggcctcagtgccattctcactgaattgactttctcaagggtggggacttttcttcgttcttccttgtatttctcagcgccttatgcagcggttgctcataaatgtttttaaccttaatttaattgactctatgcagtgctcagcaggctatcgattccgctctgagcttataccctttcaactgagtttctgttttgattctgagatccaacttctaattttatgtatttatttatttatttattatttatttatttatgttgagatggagtctcactctgtcacccaggctggggtgcaatggagcaaccttggctcactgcaactctccctcccaggttcaagcgattctcctgcctcagcctcctgagtagctgagactacaggtgtgcaccaccgtgcccgggtaattttgtatttttagtagagatgggatttcaccgtgttggctgggctggtctcgatctcctgacctcaggtgatccgccaccttagcctcccaaagtactgggattacaggcgtgagccagtgcacccagccccgacttctaatttataatttaggtttgaaaaatggatcacatttgtcttctcctgccacagatcccctgtcttagtaagacatctggtgaactggtttctttatggttcctatagaagtgaaggtttatcttgcttatcaatcagccccttcctcccagcaccccatcctttattcccctctaagaggtggtccttcacatgaatcccaagccctttgttgtgccctactacccggaaacacattttttttccaactatctgctttatctagtttcctgaaatttcatattgtgcctgatcttggattgacacactcccttccgcctgtgtgaatttcaggctgctctgacactcactgtgattggagcctttcctgtgtcctgccaccacagtgtctaaggacactattgccacgtagcacctgaggctactgctgctgcctgtggccgagatctgttctccagcaagagaccccccccacccactagccattgtccgcccagtcttcatgaagttagcttttccataccaaggtatctggacatgtaacaagatcacctggaaggccttgttgtgtgttgacaggattgtgtcgacttccctgaggaactctctcctataattggaaaagcgtgcactgattgtctaatgatttttaatttaggaattatgtatatgtttaatcaattacctgtgctagttaattatgctttcagaggagagtagtaatcacttcagtatttaaagttctctgagttgaattcattttgttgggttcttatttctctttttgtctattcatgtttattaatcgaagtcacttgcggtgatgcattgcgcctgtatcacagtgattctcagcccgtgtaggaggggatgactttgccctccaaggaacttttggcaatgtctgggaacatttctgggtgccacaaatgggggtgctgctggcatctagtgggtggaggtcagggatgcatggggcagaccccactgcaaagaattatacaggccaaaattccaatagtgcagaggctgggaaactgctttgatcataaaggataattaatcaaatcatttggtgcctcatagtaacttcgcgttgttgagggacatgtaaagtttcataaacctacaagttactctgcatggttgctcatgaattggtgtgttgtgaatcggcagctctccccaccttttcctcatggaaattcagccaatctctttgcttccttgtgcacaaaatgaactacagccagtggaattcatcagacacacaggcttagttatgctctgattttcaatcccttcctcgtctccctgcaatcctatgaatggcagccacattctgctgtctgcagtcaccctagcgactcagtgggcccgtcactgaccccgtatgcttcttcaaaccttttcagtctctagaagtttcccttctcccctccaatacttatctgctcacttttgtgctattatcacatatctccttattatcattgtatctcctttggcaggatatgccctcttttcctaaatgaagctgccacaatactgtgcatgcccatgtttcattgcaaaatttagtatttagtttgtgtttaaggatcatcatttcaattcataaaagataacaattctagtttattgtaatgagtgcatgacttactttatttggaacaaggagacactgcttaactcccgatttgtgttgacctcaataggtttacctgaagaagatggatactcacggttgtctataagtggcacagggacttcgacatttcaaagacacagggacagtcacaccactcaggtaatgatgtctgtctgttcacatgtgcagtgacaaatggaattaagttatgacaaggcattcattaacttgttaccaatagatgctctgtgtggactggagggctcagctgttctcacctctgccctgcactccttcagctgaatggtcttctctctccacctcagctgactgcaattttctgcttgtttccaaaataaggaataatgtccaaaacaactaaaacataatagttttaaatgaaatattgtagatttaatttatattgtggtactttaaaattattctcgggtgaagatgatattaaatctgctgaatgaagttgctatgcatttgaccttggctaaaataggatgactcttagtgaccacacctgggaataaaatgcttgaaccacctgtggtttcatggcatgcatcttatctcagttatgacattcatttccatgtaattcacattcatttaaaatatgacatatgatgagaacatggtaaaatcaaaatgagattgcagtccacaaaactgtttggaggtgcattactgattgcatgtaaatgttttatgtgtctcttcctaacaatttcaccaaaataaacaagattatcacttcaagaagaagaaaaaaagaacccatttgtgcttctagaaagtgaaagaatttatattatagaatgtactgttttattttccttttatgttgaattttaaaatatactttaaataattgtctttaaaatatataatgttgcattcaaggtgatgcacaaaccacccattagagagactttgttatcaatatattaacagactattgctttagcaacaggattctcattttatctaaagttacagcacaatttttatgtcaaacatctacataaaagtctaaaataacctcagccaagtatccagatgtttccacgaaatcaactatacagctaatgatcagctttccttggaatatttagcattatagaggcatggccatattatcagctgagatttttctaaataacactgatgaggtagtgagaaaaatcaatagtttgaatcttaagaataaatcttacagtaggcaatcttctgaaatcacttgcactgatatccaggcactgaaatagaaagaaaatgctgattggttgcaataatagattgtcctaatcttccctctattccttagagatgcatctactttaccttgtaagcatcacagatgcttcctctgagatcatgcacaggggaacctcctggtcatgaacactggtttgatttttgtattggaggcctgactcctgtacattacaacacaacgctgggccatctgacatcctttccaggcctgccccctgtacattacaacacaatgctaggccatctgacatcctttccaggcctgcccctgcaatgtggttcttagacaaagggagtcatttgaaagacggtgtatatagtagggtgctttgtgacttttcctctgtgtttggctaagaatcaaagagagatgagaaaggtcatcgggaatcattttccattctcagatttcaaagaggccttgttttcaaatgcagacatccctgatgaggcaggaactgccagtcatcttggggcacattctttttctcaaggaaactgaaaaccatgcttattttcttccatgcaaattgtgggcactcacgtgatgagacagattccttactggtgagaagctgtaagagttatgtgaaactatgtgttgaatggctttcagaatttattgctcatgtgacatttatacaagaagtatggacacatgcagggaaccagctttttagcttttctactaatgcaattaaatagaaattctataaaatccagtcctggacagattgggcacgtagcagtaaaattaaatggtgaccaaaaatgaaatttctctttaaggatgtctatattttcattagcctcatcagcagttttaataaactcccttcaaggaagataaaatgtctgggcgttatggtagataaagaaaagagaaaatagagtcagtgatttgccaaagatcatatggaaaattcactgagtccacagtttgaatggaaatcaagatcatatgttccgtttctgagaatgaacttatcataacccattaaaagaaatgcaggagtcattcaactgtttcataaaatttatttatttatttattttattttatttttttttttgagacagagtttaactcttgttgcccaggctggagtgcaatgggatgatctcagctcactgcaacctccacctcccggttcaagtgattctcctatctcagcctcccaagtagctgggattacaggtgtgcaccaccacacccagctaattttgtatttttagtagagatggagtttcatcatgttggtcaggctggtctcaaactcctgacctcagtgatccgtccgcctcggcctcccaaagtgctgggattacaggcgggagccactgcacctggcctgtttcataaaacataaagaatttttggttcaaaaataaaagtcttcagtagccataatggacatttgtgatttggctttttcctgccagtctcacatttcagtttcgcacctaccacgatgaaaatacaagggaagggactccctcttcctcccctgctttgacagctggacaaacacatgtaagatgggctcagttaacctacctacgatggatgcagagtgagggacatataatggaagggacaacaattgacctggctccatggggtgacattgggcagtagtggctccatgcagcaccagcagaagaatattagtcggagaagaactttgctcagagcacgccagccatcagcccctgaatccacctcacccactcgccagacctttttgtcgaagttcatgtccttccttagccttccaatgaagcctctacctgcctgagatgtccaaggttagttttctttgcttagaaatcagaattttgactaatatacacatttaattttattgttactatctataaagttttacatccaaacaagtatttttttcactaagtgtacaaactcttcatttgttctcaaaatagatgcaaaacattttctgatagggctggagccttaatatacggtggttgtttatgtaaaaaaaatatagaaaatatagttgatgttgtactgcattataactttattaatttgaaaactataatggctttatataaaagtagtgaaaattaattttacataaaatgtttgaaactagcaaaagctgggacatttgctgcgctgtgcatggggctgtgttcctttgcacttcccaagcactgggcatgaataaaactggctgtgagatacgacatcatggaattccacacactggcccttgagggagctttgtggcagttcccaggactcaaatctagaatttcgtaggttatagtattttatagtagctttggaattaaacagcatttatgaaaagaatatgacatttatctacttaccattttatgagattttactttttttaaaagtttatgctatttggcgtgatgcaatcctttagaagtaactcggtggtgagaagctaagcggcggtgggggggaatgctgacagcatcagccagccaagaatgacttcttcgcattttttgccatgatggcaatcctctgccgactcagagggccaggtaacctgacacaggaagcccacgatttataaatagagcaaaagcatgaaagtcacagggaggtgggaggatggcctgaaggcagaatgatggcagaaggggacgcagaaacaaaaatgcttggtacttgcccttggcataaaaatttctagttacacatctgtttaggggtccacacttgacattgagaaatgagctgtttaattgtttcattaagcataggctatctctatttatgttactattttaactctaccaccttttcttcatgccttattcttcttctcagcagtctgctctccacagtaatatcatgtgctttatgttcttttattttcattatgggcatttatcatatttcttgccaagtttttaaaaatattcttttgtttttgtaaagaacataaaaagttattatgcatattgatcatattcaggtattcatcgtaagaaaccattcatggtctttgataaactaatggcaatctgggacccaagatcttaataaatatccagctcactcctgccatagctgccgatgaaagccataataagatcaatatgcaattgattcacatcaaaaagcaaattgttatgtggtttgctttactgaatgatcaaataaacctttttgtaatgtcatataaaaacaaagttaagagttgcagagcactaaataaatccaatgccttctttctatattcattgtatttgttatatagactgaaatatattatagcatggaattaaaacaaattgtgtgttagataaaataatgaaatgtggaaatatttagtttaatcattaaacgataattctaaagatatgtcagggaacgtaagtaagataaccctttcaaaaggaaacatatataaatatatattttatataaccatatatgagctacaaagagaaggagatctagcacacaaagctctttcacacagccaaggttcagggaatccgtactcaccactcgtgacttacagattatgtgcaaaaaatgaaggtagtaaattaagttgatgtgtgaaatggcagcattttcaacagggaaaggtcatgtccagtagagataaatagaaatttagaaaataaaaaacaaaaacatatcctatattttgtatttttccatcataaaattgcactgtatttattaatgcaacataagtgtatataaatgcacagttttttctgattaagacactatttattatcagtgaggaggatttaattgccataaattttgagaaaataagaagtcagagtagtgactatgtttttttttgtttgtgtgtgtgtttgagatagtctccctctgtcccaggctggagttcagtggcgcaatctcggctcactgcaacctccacctcccaggttcaagtgattcttctgcctcagcctcccaagtagttgggattacaggcgcgtgccaccacacttggctaatttttttctttttttttttgaaatggatggagcctcactctgttgcccgggctggagtgcagtggcacaatctcagctcactgcaacctgcacctcccaggttcaagcgattctcctgcctcagcctcctgagtagctggggctacaggcacatgccatcatgctcggctaattttttatatacttttttcagtagagacggggtttcaccatgttggtcaggctggtctcaaactcctgacctcaaatgatttgcccccctccctcccaaagtgttattacaggagtgagccaccgcacctggctgtgactacatttttaaagaggaaaaagtcttgtgatatttctgcaagctcaccttctagatgggaaacctgcagttagcaatattattgtatagtggaggagtaacaaagtaattagaaacatttggctaactataaattctaggtaacaacaatttcaatattaatttaattggtttttaaagtgaagaaaataagaaaagaactagataagaatcccagattcatcattcatcatgtaagtgcacaaaaaagtaattttgggggtcaattagagaaaatatatgtaacatgcctagcatgatgctgcctggaatactgtaggtgcttaaaaaaaaaaaagctaaaagcttacttgctcttgttattatggtattcctttctttgcagggtcaatattctgaaaaccagttctgattttaacattgtagatgctatccaaaatatggaggagattagattggatcaagagaacccaatatttttctgggattttggtcaaatctattatatgtgtgatttttaaaatatgatttattatggaatagtataaacttaaaaaacagtgattaatgaaacatcacctttaataagtcttaacattttgcattatttactttagagctacatttttggaaaaacatgtatcctagctctcaatctcatccctgcctaccacaccagaagtgaatcatcacaatgaagtttgcacgtagcccttcatccatgtttgcacctttactgagcataggtgtactcataaatcatataatattcacaagtaataaccaatgctattcatgctttcaaagtgtaaaaaaaaatctcactttctacagattattctgcaaacagcttcttgtttttgctgtggtgggacttttttttccattttgatacatgcatctcccacttgttattttattctaagaattagctccaggtgaaatgtacagactttagggttaacaactgtagtccccgctacttgggaggctgaggcaagaggatcacttgagctcaggagactgaggctgcagtgagctgtcttcacaccattgcattccagcctaagcaacagagaccgtgtctcaaaaaaaaattaaattaaaaaacaactttagggctgaggtatcgatacaataagaaactattgatgaccgacacatacttagtgcaaaattatactcatattccttcaacaagcatggcagggagcaagctcaggaggagaggaaagcattagggactgaagggcaggtgtcacacgacctgctgctgctggccctagggtgctgtggtgcctcagggggacagatgagcacaaggcagatggtgttttcctctggtctgttgtgttgtggtccacagaaaacctaattcagtgatctccatgaaaggtgcagggagatcgatgatgctctgtgctcagtgccaatatgcaggtcatattgtagtttacaacttcactagagggctagaagttacagcacccaaggaagtgagcatacattctggccagtgcctctataagcttttcaacacacacacacacacacacacaaacacacacaatcatattgctttttaggtgcaaacatgcctccttcattggaaacttttctgagaaacaagttccatataaatgtggtcatggcatttcttaagaacatgtttacagtttgaccaaagtgagtggaaaacttacatcaaaatcatttccaagttatcaatgttacaagccatgctacaattaacatcactgaaaatgcctctaacttacaactgggggaaacaaaaaaattgcccaagattcccctagaaatggaagtgctaagtttctgctcatggacattttcaactgtagtggttattaccaaattactcccctaaaaggttaaaccaatgtatgtacttctaaaagggagtaaagttttccatctctcctggtaaacacttggtttaattattcatttaatttttgccaatatgataaatgtaaaatggatcttattgtggttttattttatttcctggttgccaagcagtattttcacatattctcagacttgttaatccaaatacatccttttcttatttcccaacttgtttgcatgattttcttgatgatgttaggaattttccacatattctggataatattccttgccagtttcatgcatggcaaacattttgcttattgtgttttcttggtcggtttagctagaagtctatcaattctattgatttttttaaagtagcttttgatttcattgattttctctattgttttactgttttattgattcctgttgttttttattttcttttcttttgcttgctttgggcttaattttctctatttctgctttcttaaataggtagcatagatcactgacttgaagtgtttcttttcttcctaataaaagcatttaatagagttgtaaatttccatctcaacactgtaatagctgcatcccacaaatcttaatttgttttgtttccattttcattcagttcaaaatattttctaatttcccatgggactttctctttggctaatactgatgctttccaagtatttggggttttccaggtacctttctgctgctgaattctagtttaattcccctatgatctgagggtatgccttgtatgatttcagttctcttaaatgtactaaaatgtttttatggcccaggatatgacctgtctggctgaaatttccttgggcacttcaacaaaaatatgtattctgcttccattgggtggagtcttctggaagtgtggattaggtctggttggttacttgtgtccacatccatgtctctgctggctttctgtgttcatttttcatctattcctgagagaagagcacagaagtctccaactatactgtggctttgtccacacctttcggtttcatcagtttttgcctcatgcatttggaagctatatttgagatacaaagacttttaaaattattgcatcttttttggtgaagatctattcatcattatacaatttcattttttatttgtatttctttgtcttaagtctactttgtctgaaattaatatagccactccattattttgttcattgtctgcaaggtatattttttcatcctttactttttaaaaatagctttatcaagatataattcacataccacacaacccgtgcctttaagttatgaaaattcagtgtttcttcgtaacttcttaatgttgtgcaactatctctacaatgtaattttagaactttttgcctcctccccacaaaaaattcaccccttcactttaatgtattcatctttctatatttgacatgagatttctgtaggcaacataacagatgagtcttatttatttttatccaatctgacaacctttcatgagaccatttctattaatgtaattattgatatggttagatttaggtatgtattagatagattctctagagcgacagaactaacacgatagatgaatatataaaggggagtttgttagggagaattgactcaacaccatcacaaagtgaagtcccacaatagtccatctgcaagctgaggagcaaagaagccagtccgagtcccaaaacctcaaaagcagggaagccaacagtgcagtctttaatccgtgaccaaaggcccaagagcccctggcaaaccactgatgtaagtccaagagtccaaaagctgaagaagttggaatccaatgttcaagagaaggaagcagggccaggcgcagtggctcatgcctgtaatcccagcactttgggaggccgacttgggtggatcacctgaggtcaggagttcgagaccaccctggccaacctggagaaaacctgtctctactaaaaatacaaaagttagctgggcgtggtggtgcatgcctgtaaccccagctactcgggaggctgaggcaggagaattgcttgaaccagggaggcgaaggttgcagtgagcagagacagtgtaattgtacttcagcctgggcaacaagagcaaaattctgtctaaaaaaaatgaaaaaaaaaaagaaggacacatccagcatagaagaaagatgaaggccaaaagattcagcaagtcaagtccttccatgttcttccctctgctttattctagcagtgctggcagctgattagatggtgcccacccagatcaagggtgggtctgcctctcccagtccactgactcaaatgttaatctcttttggcaacaccctcacagacacacccaggaacaatactttgcatccttcaatccaaccaagttgacactcaatattcaccattacaaggtatattagttttattacgtgtttttctgattgtccctgctgttttcattcttctgtttccttatgatgacttctttcagattatttggatatttttaaaattccattttacattacctattggtaaattaaaattgtaatatatgaacatctaatttcagtctaccctggtcaaccgtcttggtcccttcaccctctatcacccatctttacttagcagttgaaccatgtgctacatctgtgtacattgaaaccccccaggccatgttgtaacttcttctttcaacagtcatacagggaaaaaatagtggggaaaaaaaatcgtcttttatgctaactcaatatttacaatttctgttgctctccttcatttctgaagttctgagtttccttctggtatcattttacgtcagcttaaagatctccatttagcatttcatttagagtaggcccaagaaatcttagttttctttacctgagcatgccattattctgccttcattctctacgttttgattccctaccacgatttgtgttttgttgttgtttttttttcaactttcccaattcctcagatagatgttttgtattttatacaaagttttagttgtaatcagtgagagaattagactatagtaggcttacccgtttatgtgtttatcccacgtaaagttttaatgttattatagtcaaattgattaatccttacctttagggtttgtacttttgttgttctgtttaagaaaatctttctacatttttaaggaaaaaaaaattattttactgctatctgccataaagatattatcctattatatttttgtaaagtttaggtttgttttttacatttagggatttaagctacctggactttgtttttgagaatggtgtgagttagcaatgtaattttacattttttctgtacggataacaattgttccacactttttgcaacataggccatgcttctgcttcctcctaacactgagtatgtcacctcagtgacatataatcagtcagtgtaatataatcatttgtgtgtgtgtgtatgtgcaccttgatagacctgtgagcttatagagagtgcattaaatgcatcttaatcacttttgaattccaaacacaaagcacaataatttgtcagctcagtgtaattgttaaccagtagcagccccagaagaattaagagaagctgactgatatattattccctaactttattagatattttaaatttaatcccatgttaaaaatgtatcaataaacttgttaattaggatcacaggcagttgtttcactggttggaggaaattaaagtgaagtcacattttattcagtgattggcttctaaaattatgtaatttgaaagtgacatatgatgaaaaccactctggaacatccttacattacctatcaagaataatatgcaaggtttgtaactccattcaattatatgcatccatgtataagcaatgcataaagcaacttaaagcatataataatatatatttagcattttgagttccgagtgagtggattgcataaaattgaattttcaggctgggtgcagtggctcatgtctgtaatcccagcactttgggaggctgaggcgggcggatcatctgtggtcaagagttcgagacaagcctagccaaaatggagaaaccctgcctctactaaaaatacaaaaattagccgggcatcgtggcaggcgcttgtaatcccagctacacgggaggctgaggcaggagaatcacttgaaccccagaggcagaggttgcggtgagccaagatcgcgccactgcactccagcctgggggacaagagcgaaactctgtctcgaaaaaaaaaaaattgaattttcaaaggctcattcattgatcaaaagatgtttattgaggttctgcttgtactaggcacaagtctaggcacgtgggatactttgtctacaaagcaaacttgcttgccctcatagaagttaaattctagcatggaaaaataggcaatatttaagtaaaatatgtaatacactaaaaggaaaaaatcatatggaaaaaagaaaacgttcaacagggtaagcagggttgggagggtcagactggagagtggtgaggaagaaggttgggctgagttgcaattgtaaatcagggatcaaaaaaagcctcctgagcaaagatatggaagtcagggagagaccagtgctgacgtcagggcagagtgttctaggcaaagggagcagccaaggccctgaggtaggagcatgcctgcattgcaaaaaggctggtgtggctgcagtgagattactctacttgtcactagatgttcaagtggggttgaaattactataagtgttaattctaggaaagggatactttccagttatgaactacggcaagaggctaaatataaaataccaattatgactatatcatattacaaccttctttaaaatcattttactcggtttggaaactttaatctgttcagagtataagtaaaggttaaatgtttgcctttttttgtaagtggaaaatattagacatatagttctgtttctgctcaagatatcagagagttggagagagactccagggaatctggaccccatatttctgataattttgaaagcgaaattcaggctaaaataatagaaggatttccattatgctgaaatagagtcagctaacactgatgaaggtatgtattttatgtcctcagcagacctagtagacctgatttttctctgatttttatgattgcattattatttgaaactgtcattttgtatttctgactctgtttctaaaacagatgagctgtgatattggaaagaagtgtcatgcagtcaatgatataaaaagcctaggttttgaagcccaagtggatttaaattaattttatacacttgcaggtgatttttactatctgtttctggaaaggactattaatttaaaatatttgcttttatattttgcctactttagcagggtcttgcctcttttccctcctaatccttcctgacatctgtttttcttttctctagcatttgtacccacattatttgttctgacattatcttaagggcactgtaattgagcccagagtcacagtggcagatgctgtgcctgccaaattcatgccttctttttcttaatcacaaagctaaactatgtgtcccagtatcccttgtggttaggggtagtcatctgactgaaactagccaatggaatgagaaccattgtgaggggcaccacttacaagcatagcccatgcaacccaaccttgactatcttctatgacctttctcaacccaaagctggatacagaatcctccaagactcagaatcctccaagactcaggtttacttatggtgacatgaaaggtcatccactcatcagattctggcctcaatatgagcaagaaatatccttcttttgtgcaaagccactgatatttatgatttatctgttatgacatcctgggtaacctaactgggacctcttcatcatttatttgcttaatattttattgttgctgttaggcattaacatttatagcacctaagtttagcttccattattcaataatctttattctttaagatagccaaaatcatgcctcttcatgtcttccaatgacagaattgtaggaatattgctaataagaagctatagtacaaaataatgatcagttggtgctccaccaagccacacttcatacatactctctctctctctctccctctctctttctctctctctctcacacacacacagtgtatagagaatagtgtatataaagtttgtaactcctaaaaattctttaaaaataaatgaacttaattttgctgaaggaaaagtcaattccctgtaataaattgggcaccctgagaaatagaaatattttaataggttcagcattttctgagtgcatttattaatgatacagaagtgcctctcttacctccagttctcaagtgggtgactctaacaggtcactgcattttggagttgctaatggatcccattgatttgctaatctgtgcccctttccaattatagctgatgttttaaaatctagttggattgggttctgttacaatccagcttcttaaaattattttcttcattcatatttgattctatttaatactgttacacacgattaaataacatgattatttctggaaaaaaaaatttgagaaattactaaattaatagttaaactgtgtcctgcaaaacaatgtaaattaagacactggctaatgtaacaggttggggaaagtatccttctacttgagtcctctctcctctgaaggctatgtgtgccatgctaccatgattttgacgcttgttttcctcacctttattcctaggccttacctcctttcctagttattcacgactctattgttactccaaagccaactgtcaaatcctatacccgtatctcacagagcttttctctctcttggttttataataattatatacatgtaagcaaaatatgaataccatttgttataccactcaactcaattagcctttcttcttgttgtgtcctagtcatcctttcaatccagatcaaatcacatatcccagtggccatactgcctttaaatgtgttgtttctcttctgtattccaacagcagtaatgacatgcataagttattaatcaattaatgctatcctgcctcgtgaaatttttgtacttgtgtcttgtctaagcatctttattcatataatttttatgcacttatgtcttgttacccaatttgaatgaaagcccctcgatggaggtggtcagattgtgtgcatctggcttagtcctatagaacccaccacagttccttgcattttcataaacatatgaagcacatttattaattgattgacacggaaaacttttttggaaggcaatgtaattaatacatataaaaactgactaaactcaattgtacctgaaatggcattttgactctaccactttctagccaagtgactttaggcttgaaaggtgactttctgcatctgtgaaatgaagataatgatattgaacctgcatatttcacacggttgtgagtgtcgactagagtactaacgtgaaaatgttttaaggatataaatgatatcatgaagatgatactagaaatgggctttagaaaccttgagggggcatctatcaggcagggaattttaattcggacgtacaaaccaggatgactgtagggaagaaaagtagaattccagggtgtgttccacatatatctggttgggttgaaatatagagactgtgtcagaatggatgatgacgaggctagaataattcagtgtggccagaaaatacagaactttctcaaagcatatgggcttgattctttctttaggctaggggaaggcagtggcattaaagatttttgagcaagcaaattatatagacagatttttttctctctaaagaaagtggcaagagaacagagttcatacaagatccttatcctaaatgtcacaaattaactatattgcatgatttgtagtaaaatttttaagtttctattttataactttcagttataaatgtataatgtataacatatacattcactcatcagagtccatttttactcataactatgtgtggagaggttaaaatcagctgccaaatgcaaaaaaaaaaggtacttaaattatactaagtgtgttccagtataatgttacttattataaaagtaaagaatagttgttgattttttttaagaaattaaagcatccagataaggtaaaaaatgcaaatcctctctcttgcttccttccctcactattgtccagatatagctcctcttgtttccaataaaacttttaacgtgccttttaaaggatattttcccctttgtttaaaccttaagcaacaaagaaacaaaatcccaagaatgaatttaattgtattgctatataaatgaatatttctgaattaggaaggaccaactcttttaaaacaccacaagtgctattttgactttcagatatttttcttggttctttagaagtgtagatatatgtaagcttttaatcaaagactttttaaaaatcacactttatgctatatctttaggatttatttaagtagacttcggttttatagactctgttttttcaaatttcatttttcaacattttttattcttcaacatcttgttagctccaagtagaaatgcgatttgcatttgaaacactaatattcactattcagtcagccaagacatttccttcttttaatttccataaatgtcagtaaatgcctcttttcacctttgggtgaatagtcaatagaaaaatcaattctgtgacaaatgaacagcaacatgattttacatatgaattatttaacaaagactatttttatccttgaagggaaagacttaagttaaaaatcggtagcaaattattaatttacatttattaatatgatccacaggaatgcatatccatagaaattgaagaaattttatatcttatgtttaattggttcatgccctagacctcataattgtccaataggaaattattgaaaattagtaaatatataaataatcaataaacctcattaagcctttagatcacgttgtattttcacccaggttgtgagagatttagtgttttgtaatgcctgaaaataagtgaactaattacaagtgtctcactttagagaaaacactggcatcacctccgtttttacatcactttatcaaactccatcttcttatctaattgatgtctcctagatgttgagagacacaagattctttacagtaaagtacagaaatggaaagtagattcatgtcttgaatgtctaaatttcaaatcaccaaggttttctcaataacagaataaaatcattttttaaatccccgtactgagttgtcgagttagtaatcaccagtatcttaagtagcattgtaattttctaagaattaccatttctatgaaggaatcttcttgttgaaaacctaataaatagaagggaatttgtttgagggtgagtatcccaacccatagggaaatgggtctggaccatgatcatttatatatctgtttgcatatcctaggagcttgaaatgcttttctggtgttcagaggcacagacattcattgaatgtaaatgacttagcttttaccttacataatcctgtcttaagagcagaaagaacataggggtgttagaggtttaacccaggccacattttaggtggtccaaactgacaggagcttgtttatgagaaatgctggccccaccctaagggctccagtaatactgccttggccacaaatgtttgtggaatggatccctttgtcaatttctttggacgtcaggttttcctagctccgtataaaccgtgactttgctctctcattacagaactgcaagtggcccccaaactttgaagctttcagctctcttttgaatgtcaactttaaaaataaaaattacagaataactagcaagtgtcttattagcttattcaccaaacaattttgtttttaaagacattaaactgtcagagagcctgtgcacttttctaaatgcctggattttgtacctattatagaacagtacaattttttccgtgccatcccaaaataataattttggacatgtaagtttatttgatcccttaaccctaaggcactgcattctttggccaccaggagtctgtggtgactgtccccctctccttcagcggctccgcccactagccattcagatctatttaggcatgttgaattcacagcaagaaacgagcatgggaccacccacaccccatgtgatttcagagcagccgagcatttttaataagttcccagagctttctagtgtttgaaaaacccttcgctgaatctgtgaatgtgaaatacaactcacgtgtaagaatgcgttcaggggaagcctggcgttgcttgaaggcactctcttctgttctatttcctggacttgatggagctgagttgcccatttacccccaaggtttttttttaaatggacccacacatttaatactgtgtgataatgtttctcccttctctcaaacgtgggccatgcattcatacgcttactccctttaaactctctaagcaagtacactggatactttgtgctgggtagagattaatttactcattttaggctccaaggacaccatagtcttgtgaggcagtaactaattctacccacatgcaatagatcaacattactccaactcttgtaatatacatgatactttttaaatgaaagaaaaacatccccttgacccttaaagtttcttaaattattttacaatgttaattaaatgtatagacatacagtgttacaaataatctctttactctttgagctttcatttcagctataaaaccaaggcaaattgaccacttgagtagaataaaagtctacaaaagcaaaataaaggtaaaattcacaacattgatgttaggcatgagattttgtttagctgaaatgacatgactgttggaaacgtgcgctgactattctattcatcaagttccgtcaagctttgtgtgtttttcccactttatgccactggctaaccaagcccctaccactatttctatttgaaatgacagccagcttttgaacttaccctgctttgcaatatcacatagcttttcttgcaggaaaaagaaaatctattacatattaaatccatctgctcttttctcattaacctacaacagtataaataatattacttctgtcatcctactcataaataaaatacaaagacataaaaaaatctcattgagtactagcttgaaatatagatattcaagatgatacaaagtacaattactttaaaaagatatcatgaatatataaacgcaaataaattttaaattgttgaaggaatttgaggactcctgaaaatacaaaccctaacttcagaagcattgcatttaacaactgtttaaataggtcactaaaatctcttcatactctttgttatcttacccctaaaattcaaaaaagctgtaagagttttctaattttcttcctgtagaactttatttagttttgagtcatatataaatcatagttatgttttaaatctaatgtgttgctcagtattttctgggttgctttttagtaataaaagaatatattatgttatatttataaaaggccataaatcgtgagaagtgcacctatttagcattacttaactgagtcatcaggataatcataattcagcagtgtttaaggattttgttcaagtcaaggagctaaccatggtacaactgtaacagctcatatttaaacagcactcactacttttgtgaggctttcttttaagacacctgcatatgtgactcatataatccacatcaagttgttacaaggtaggtaatttcttgtggtcccactttacaggtgatgaagccagcgaatgcttgttcagcattgcacaagtagcttgcatagttgggttccatcccaggcattccggctccagaggccaggtttttcagccacactgactgtgctcaaaaccatcctccaattccacatgggtttgtcatttcatcatagaaaatgaagtttaatgtcattcctgtcacttgtctacgtcaaatcctgtggaaacccttctcctcgcatgttcttctcccctgttctaactggttaggtgcccatctcacttctcaatattcagatcaaaggttaattaacttgtgaagcctcctcagactttcctccataaagcttcctttctcaagtaaatggtttaataaaaaaggtatatatatatatatatatatatatatatatatatatatataccgtcattttgcctcgctccatctctgtgccctgggtaacactttaagacacgtgttttgtttgtctaaaagctccttgaaaagcagctcagttgtcccattcatgaagcagggagctcctagagcagaggcatacgatgcaagcgtgaaggtttgcagatgtggagtcctttgtactttcccagtcataacacttgccttctggttctaaaagataatgattctgtgtacaaagactattataaaaagttccagaaaagaaaataaataagtgactcattatctgaagtggtgatatggggtgaagataataaatcttttaaagcaatggaaaatgagctttaagttaaaagataccactatggcatcctttatattgtacaaacaaatcaggataaattatactcagtgtgaagccagctgactccaaactcacgctgccagcagcatccttaatccccagaggcagtttttctctttccaaaaagaaatggtatcaaaactaaagctttttgttacaaaatcactattgcttttttaatgataatatttaatttactgtgaatatcaaataatggtaaaggaagccatgagtgtttttgttgttaccagtagtacataaagtttaaagaatggataaacactgatttacatgattttacagcactgactattttaaatgctttgtattgtttatatagtactggactgccatttagatagcattcatgattgtatttgtttgctattctaaaattttaaagctttttctctatgagaagagtaattcttgtgtttcagaatctaataaatagatggaaataaagcagattaaatattgttaaggagtactggcctcctcttctgatcttctatttcttggctcacagatgatgattttaaaatgccctctcaggtaggttgaaggtagtggcctatcatagtcttacatagaattataaccttcattataacataacctatgaaaattctttggttttattttaaatcaagatcaataaaataagatgttagcatcttatttcagccattctggcaattcttatatacctagtagattttactcaatagctattaatgtctgtaatagaaaagaagaaaatttccatgaaatccctcaataaaggggtttattctgaatgttaattggttattgcaaacatcagtcaaatttttgcttatcaaagaactatgcaaagttcttgtttgttgattcaaatatggtgtcctgtactcactacattattcaatacatcaataccctcattaagaaagggctttcaaagggtttatgtgtgtaagtttcaccttttataaggtacttgggaattcagatatttttagtaaacactgagaagctttgaaagggtaagacagcatttttttccaaaaagagaagcaatgactcaggggatctgggacttttttttttttttttgtcaaaatccttcccgacaagcctaattcagatgagcagccactgaaagtcactctcagcagattggcactgctgctatgcttctatagagtgactcaaatctttaagtctgttcctgttatgaaggttaagcagagggtcacatctagtatattttggtcactatgaaacactgctgaaaagagtttaggatttagaggaaatctggagtggatgtattttgtgcttggtgtaagcacagagttgtatggtctatcaaacactagcattgagataaatacagcatatgccataaggagatggaagagtaacaccaactgctgggtagagatttggattctgtttgtttgtctagtttttatgctttactttgtcttgttaggaattggtctctattttcatatccttttctctacagttcttgcgttcttttagattaattggatatttattatttcactgttacattaactttgattaaatattatattattcttttagtaatttcacaagagaagacaacatgcatcctttactcattgcttcctaacagatttgatcactttgaccactttctaatactgctagaaccttaagacctcgaaactctacttaatcccaataacaaggttttgcagctattgatggcatgcacttgtgttattcatgtaatttaaagtctataaacatttcaagcatataatttatagttacccatgggtttactaattccagtgttgttaattccctcttacatttccattttttccatctggaatcatcgtcttctacaaaaaaaaaaaaaaaaaaaaaaatcttattctttctattaatgtaagaggtttgatgacaaattccctcatttttgtttgtccaagaacgtctttatttcactttctttttaaatttcttttatttccataggtttttggtgagcaggtggtatttggttacatgagtaagttctttagtggtgatttgtgagattttgatgcacccatcacccaagcagtgtacactgaacccaatttgtagtcttttatccatcatgccctcccaccctttccttccagtcccaaagtccattctgtcattcttatgcctttgcatcctcatagcttagctcccacttataagtgagaacatacaatgtctggtttcccattcctgagttagttcacttggaacaatagtctccaatcccatccaggttgctgcaaatgccattaattactttttatgccagagtagtattccatcatatatatatatatgtacacacacacacacatcatatatctatacatcatatatatcatatatatgatcatacatatgatcatatatggggtatatatatatcacatacatcatcatataccacagcttctttatccactcattgattgatgggcatttgggctggttccacatttttgcaattgcgaattgtgctgctataaacatgcatgtgcacgtattttttttgtataatgacttactttcctctgggtagatactcagtagtgggattgctgagtcaaatggtaattctacttttagttccttatggaatctccatgctgttttccatagtggttttactagtttacattcccaccagcagtgtagaagtgctcccttttcactgcatctatgccaacatttattattttctgattttttgataatggctattcttgtgggagaaaggtggtatcacattctggttttgattagcatttccctcaccagtagtgatgttgagcattttttcatatgtttgttgggcatttgtgtatcttctttcgagaagtgtctactcaagtccttagcccacttcgaaagaaattatagatgatgcgaacaaatggaaacacatcccatgctctttgatgggtagaatcaacattgtgaaaatgaccatactgccaaaagcaatctacaaattcaatgtaattcccatcaaaataccactatcattcttcacagaactagaaaaagcaatcctaaaactcatatggaaccaaaaagcccacatagccaaagcaagactaagcagcaagaaaaaatctggagacatcacattatctgatttcaaactatactataaggccatagtcaaacaacatggtgctagtataaaacaggcagatagactaatggaacagaataaagaacccagaaatacacccaaatacttacagccaactgattttcaacaaagcaaacaaaaacataaagtggggaaagacaccctattcaacaaatggtgcttggataactggcaagccacatataggagaatgaaactggatcctcacctctcaccttattcaaaaatcaactccagatagatcaaggacttaaatctaagacctgaaattataaaaattctaaaagatcacatcagaaaaactgttctagacattagcttaggcaaagactttatgaccaagaacccaagaacaaatacaacaaaaacaaacacaaacaggtgggacttaattaaactgaagaacttttgtatggcaaaaggaatagtcagcagcataaacagacaacccacagtgtgggagaaaatcttcacaatctatacatctgacaaaggacaaatattcagaatctacaaggagctcaaacaaattagcaagaaaaaagccaaacaatcttatcactttcattttcgaggggtattttttattcagtgtagaattttatgttgactttttttttttttctctcagtaatttaaccaggaacatgttggcttctggcttccagtgtttccatgaagacatcagctttcactcttactgtagttcctcgctgggctgtgctggagaaccagtctacccctggttctctcctaatcctcaggcttgatccgcctttgcctttcattgcgaggtctttgttcctcagccctgaaagatgacagcaaatctagccctgtgtttcagagctcccagcctgactctgcagccttgtgccccacacactttcaaaatccagaaaatgttttaagatgagactggtcacatgctagaggccatcatcacccctgccagggttttacttctgaagcacctctgtcactgtaggaggtttcattctgctttctataaactttggcctagggcgcccatcacccatgcaggtgaacagctaaatgagtgtcccctgtggacgatggctgtgcatttgaggacctataagtttccaatttgtttctttagtcccatgaaactccaaaatatcatgtggtttatcttccttccagaaaaaactctctggatctggggaaatgctcagaattggcaaatgtccccgggaggaaaaaagcagctggtaattatctgttcacctcaaaaagcttcactccatctggaattctctccatttgtcagaatttcctgatgttttagaaaaatgactcttttttgaaatttttacaacaggaacaataacatgctatagctctccagaagtgaacgttcctcagtttgttttctaaataaatgaatatgaagttgtgtcatttaggaaacatggtgtcttaagaaaacttggggaaaataatcagttgacatggtagcgatattcttccatcagttaaatgttgtttcctgatctggtgacattgttttcagagatcactactgtatgctgagtgtgtgccaaggaacataaatatgaatgttccatgtccacactaatgagactgaagggaatgtaaccagcacagcacacactggtggaggatgacggaggagctggcacacactcctggacaaacatagatgactgtggtcccattcagaaaaagaagggaagaggaacatggtacaggggactctgatccttagcctgtatcagatcctagaccacaatagttgggttaagcacagtagactcacagctaaaagcatatcttcttttgagaattgtctactcatgtccttagcccactttgaaagaaattatagatgatgcgaacaaatggaaacacatcccatggactcttgggccaggctgccaggatctgtcattttccatgtggctttggccagattacctgactgccctgttcctgtttcctgatctgcaacatagaagtacccactttacagggctcttaagagctgacgagttaatgcctggaaggtgcttacgaaagcacctagcacacgtgtagccaaagtgttcactaaataacctgatttcatgcaagctcccaccaccctgctttcttggctcactctgctgagagtagaagcaatctggcttccacaagcatctgcccaacagaatttctcatttccaggccattctgatgcagccctaaagaataaaaaaaaatacccttttaagaggcccactctgctctgcagctcactctctgttatgtctagaaattgctttagggactgagtaaccatagtcctcttttctacccttaagctcttctttcctctggttgtctgtaaattcaactggggaggctccttttactaataaccagctccagaactctagttacagactctgaatatgggtttgaccttcatgctgtaaacatcatctccttgatcccagcctttaaaatcctctttctgggggaaacagtaggctcaggtgttggtgttagaattgggcctggatggaacactcactccctttgctgctttcaagtgactgttttctacataagtgcataaccacttgtgttctgttttgttttattttctctcattttaatggagagggttgtgatgagatagaagaagtgctggaacaaagtagttagtgctttggaggtaggatgagtcatctcatttcctctgaattctccccagtattcctattcggatttccagaatctcattttttttttaaaccagtatacttccttagaattgccagaaaaattgatatctgcaatgtccagctactacagacttctggcggctggcagaagaagggtgaccccagctacatagccagcttgtcttgtgccctagctgaagtcagggggtaagcttggtctgcagggtgtctctcttcaggggccatagtgacacaagatgatgtagccaatacagttacatgttttgatgctttcctgcaaaggcccataatgttcccatctttgagggctcagcgtctgagagtacacagttgctaatttagctcattgctttgtctcactgccaccaaatagagcaggcaggtagatacaccaaagaggcttcaaatattctcaagcacagctagcccgccttgaatgagctcattggatattttagtgactgccttttggaacacctaatgcttgaaaacattttctacatgagtgtggtgtgattgtgtattgtctatgaacggaccctcatgagtaggggtccatctttgggtccatgccttatggtcggaagtgaggtcatgtaaccctaatagtcatgtttgactattaactatgtggacagatggaggagcagctccgaggatggagtgacgcttgaggaagctctgttaataggagaacatctattatggatagaaattaaatgaagagaaagtacaagatgccataagaatgtacacagtaatcgagggcataggtcaagcagacatttgattctttcttgtagcctctggaggtgcagcacaccttaacactctacctagttcccaatgttttgttgcagtcattgccttaactcagcaattcacagcctctctagcccagtgctgtttccagaggcagcagtgcatggagattgaggaaagaggctgcctctttcagcaccagtcctgcccctttgtatccaggtgttgctatcacacttcatactcattcacaatatttggtgctacctgttttttctgcccctcttcctcccacaggtaatccatcagctgaggctctcagagaatgaaagtgtggccctgcaggaactcttggactggaggagaaagctctgtgaggaaggacaagactggcagcagatcctgcaccacgctgagcccagggtgcctcccccaccaccttgcaagaagcccagccttctgaagaagccggaaggggcctcctgcaacaggctgccgtctgagctctgggacaccaccatttgatgtggcctgaactgcagacttacaaaatagaactgcctactgattccgggctgcaacaacagaaggctgccttctgacatgcgctggggcttctctccacgcatttagacaaaaaaagcacaggacacagacactaaatatatgagatcccgtgtgtgtgtgtgtgtgtttgtgtgtgtgtgtgtgggttctttcttatccatctcgtggtgatacactctgattttcaagctcctcatttacggctctgtgctacccctaggtagcaagagagaggctgggaaaagtgtggacgtggccagagcgagagagtagcggaggaaaggagcaatccatgcacactctgtacagttgtttttctacggttcaacagtctgtttattgtacttccaatggttttattataatacagtatacgggacatatattttatttctttgtagctacttgtgttttattggtattataaacctgataattatttacatgtttattactgtaattttataaatttatgcaattggtggtgcttcctttcttcaaaatacagattttaaaaaatcatttctagattatttttttcctccacagtccttttttttcacctaacgcacctaaatcttgaaactacattgttgttttagcttcgccagtgtcaccccttgcaaaactatgaattgagccccatgttttaggtgttactcatggatgaggaggctgttctttcctatgccctgtatttctggataagtggattgtgtaccctttagttaaatttcacctcccgacttcagcatagatcacaggaaatcacatggcacacggttaaacacgtatggcttcaaatccatagccggtggtgtaaaatgatcatattcattcaaaggcctacacagtacaaatgagcacgctgccatgtactggtttgagcagtaggggctgcatcgcacagcgctcgtcccccgggacttacactgcatgattccctcactgtatatcctcaaccctcccataatgcaaggccttgttcattgatgtgctttcgtcggctgtcggaaagttctgagcagtggctccagaccaccttgtcttgctacttggaactttttattcataccagcctttgaaaagttactgtgccaataaagaggtacaactgtgttcttctattgtttttgttgttgttattattgtctcccatgaactcttgtgttttctggtcagagaagtagggacaatgaagtgatctcacccagactcccttaatgtgggggccatagcattgtgcaaactttagacaccaatgatgttttacaatacaggctttatgatgattccagtatggtgagaccaacaggtctggaagggagtcccattgaaaagacggcttgtcatcctcagaaagctcagagaagaggacacatagtgccatcagagggccacaccaaggtcagccaggaagcagagggcatagggggagccttttattttagtttgcacaacactaggaaaggacaaggcaggatcagcaggcatagaactgactgctttgagaaatatcggtgggttctgggttagcggagccatccctacctgtctgggacctagccttgaggtgattagggtgggtggagagtggcctggaatgacagccctatgagagcccacaggggagacttactagggatgtgggctctagattggttgacttgtctttgaaaatcatgttctggggtgagtcatcattatcttttggacgtggctaaccctggaaatggcaattcctccaaggtcagcagggccccagatgccaaagcatcagaacacagcaaataaaagcacatggtcaatatgtagttactgcaatgttactgcagccacccagcaaccacaaggaagtgttctgcctgacctccagcctgacgacagccgagtcccattccctgcctatttctctcatgtttttcccttctgacttccacccccgcgaagaagcaatggaagaagccaactttcccttgatacatggcttcttgggccatgctatggacataataggcacttaatgatcttagttgaattaaaactttgaattgcattctcctccccacaatatatttaggccagggtgaaaaataaactgtttaagcattgcacattgcaagaacttgcttcaaatgttcactgagcattgtgctgactgtgcgaggtgctcagcccatgtgattcctaaactggctattttggttagggctgctgtaacaaatggccatcagcagggtggcttcaacaacaagcatgtattcccacagttctgaagcctaggaagtccaagatgaaaatttccacagatcccgtgtctggtgagggcctgcttcctggattgcagatggccatcttctcatcgtaccctcgcatgttcagagaagaaggggaggaagcaccctctccggtgtctcttcttataagggcatgaattccatcacgaggcctctgccctcatgacctaatcatatcccaaagaccctgcctccaaatttcatcatactggggatcagcgtttcagcataggaattctgggaggacatagttcagtccacagcactgacatatgcctacaaggtaatttttatcatttttgtattgatactgaaattgaagcttatagctttaagcagcccatcagatataaactctcatctttatgattccaatgtccatgccattttaatttgatatacagaaattgccaacttactttatgaaaagacacctgaaatgatgatgcatgaccattgtagggagaccttacgtgaagtaaggaagtcacaagccacatgtgtgtccaaaccacacaactccctattaacccaagttgaagcactggggcctgtgtcatcactaggtaaacattacagtcacctattagggtactatgagcatcatgaacatgaaatatttaacctctcagtagtccctctgcctcatttaaggtttgttgaccttcagacactagaagccaacccgcttgtagatagattgtttaaacacaatcttctaaatcaatgtggacagaccctttaaacacaatctccttaatcagtaagtaagcccttttgtgtttagttgtttggattctccgctgtggaaagagattgcaggtgtgtgttaatcactacattaggaccatctgattgtgcctgttctaattacatgatatgaaaatcagcagaggctcaaaagcatcaatagccatgacagtagtaacagtattaacagtcacaataatacgaagtccaagccttcgtgtggattaaagttactctcagaatggctctctaatgattatactttgtcaagaaaataaagaggtaatattctgggtaataaagtactgaatattattctacataagcaagatttcagcttttatgtgtgtttgcaaaatatttaatggtggtattttaattgccatcagaccataaggtatgaattaggatgtattattgaggcttcaaacttatgttcagcaatataattggtatgaattattaccctatgttcaaacactgcccacttctattgcttttttaaaaaaattatttatgagagctctctaaaaaccactatccaaatgtttacaatgagttaaaatgatttaaaatgtatttcccaggatggaaaaatatatcatcactattcttaaatagtggtatctaatttagttagaattatgcttatataaatctgctcaataaaagcaacaaccaattaaaatctaagatttatgaatggacttcacaaataaacattacacaacttggacaaaaggtatattatgaattccagagtctgaaaggatggatgaacttttgtcaaaattctattgctgtcagtttccagccagacatcaaactcaactcgtatcacaataaagggcatgagggtattaaataataacgttcttcaataggacacgtttcacccattgaccgtcacttggaactgctcattttttcctaatcatttaaatgtagtttttgatgagaaatgaatggaattgatttctatttctcatcaggaaagtttcaataaaaaagattcttaaattagctggaggaaaaaaaaactctgttccaagtaaacatttagtgtaattttattacatttttcaaattgtttttagctgcacataaaaatccatataatgaagacgaaagcaattaaatttctatttactgtggaatagtgagttctgtgtgatactcatgggatcccaaaacagtagcactgctttcaaaaaactaaaaatatcatctccacccccatttttcttcctttacatcttattcataagcaatgacttcataaaacaaattctactaccaacgatgttctgtgctgcaaggcgtccacgtgagttacaaagatacccattagatagcaaaaggttgtagcatgctgagttacagactgggaagaataatctttgtagtttttttcactttacctaaatactccaaacccctgcgatgttctattattgtggtttcagtaagtttctctaaaatccaggatgctttataaactttaaagatgttatttttcaaagggtatgtcttaataggtgcctataattcatctctatcacctgttctaatttctcagatcattttccaggctttttgaaatgtgcttatactttaaatatcattcttgtgtgcttcaacatcagcataatataatctgaattttatgtagtttaccggatcattataatggcagaagaaaatgttgatgtcctctcataagaaaataattaaaggtgaataaatctatgcattcatttctattgttgttttataataggaatgtatcaaatgtgtcttttctttcctttgaattagtcatgggacagacaccctgcatatctgccagcttgcctttccctgtagccccagggaacaagcgctgcttcaaaggaaggccagcgagcctgctcagatgacattttcctgatgtcaccatttggcttctgaagtctaaagaaaatgaaagagaatgaaactattgataaattccaagggagggggggatcaaagctctaaagaaaaatggaataaaaccaaattcaatttgagtttttgatcttttaagatttcaacaaacaaaagggttggagggccatgatctaaaacaattaattgaaaaatgtatacattctgtcatatttgaagagaggttttctttccgaacttaatgtttatgataaattgcattagacttttgtgtggcaataagaagagcatagccacccgaccactccctattattcttcatcaatattattgttgaataagataattacatttaatatcacaaagctagtgttttggacactttttaatacaaataggtcatctatatacacctgttttgtaggggaactagttcttcagacaattataactgcattttgtggttggagaactattgtcattcccttgggcttagaaactgttacataaaaggatgaccgtctatatttttaaaagcaagaaaattttcccagcaaaagagaaaaagaggccacaagaaatccaccgagtcatggcctcggatgctcagggtgtcaatggtaaggaattaggaaatcagaggtgacactgtctcattactgacgtgtttttatcccgtaccaagaactcttatttttcagcctcagaaggaaaggcaaaccctacaaagacataatacttgctgcccacagtcttcagaagccaaaagtttgcccacaaagactcaatgagaaaaattcattaaaggtacaagtcactctacctcccagttttgctcctgacagttggtaggtggcacttgtgggcagttttcttatttgtcttgacttcccacccctatctatgtttgttactcaagttggttgttttaacaaccacaggctctagtggtttcacacaataaagctgtccttctattttagtattctctcttaagtcacagttgacacagtcattcaaagatcaagggtccgtccgtctcatggctcagcctcctctaggcctttgcgggtgctccttgcttagccagtagatgaggattagagcacagggaacagacccaggaggaattcatggcctgcctaaaaatggcttaacgtgcctccacattccatgggccagaactcagtcatggagctgcacctggcaggaggggcctgggacatgtagacctactctttgactagggggaaagggatgcgacttggttgatgatccgcctgtatataccacactatgtgaggcagggaagtcctaactataactacctaaaagcaattttatatttccttctgggctcagaaggtgcacagagccactagccttctgccaaccatgagatgcagaaaattccctacatcagcagccgccagcccaccttcccaatgggcccttgtaagtcttcctgtacccagtgctggagggtaacgaggtaaggatgagtgggaggagaggggggatatagggagtccctcacttccctggaaagcttcccctctccaggcctggcagcagttcaagcagggagcactgggagggcctcgtggaggagcaagctgactcttctctgggaagatgcagtgggctctgcagactatctattgggtcctctctcacacaagccctaggcagacagacatctctctgttcctagagctcctgaggctctttcctgaattcgtggacatcaggaggaatctttgtcctccttctctgaagtctcttcagtctctcccacacacagtactctgtgcccttcaaagcgtggtccagtggccagcagcaatggtattgcctgggaaactcatcatcccaatcctagacctgcaaagttagaatctgcaggtgagccatgtgcacatggacatttgagaaaccctgctctggaggtccccaagtggcacccaccaagcagctcacatgcagttgttgggagcaccctcaagcagcgcttacccagcagagcaggctgagccggagcaggagcaggagcactcagccccgcctccaaagcgagtcagcagtcttcgtcatgggccaggtactagttcttgggatctccccagtgcagtaagcacattttccagtgctccctgggggctttgggggagcaccctcattaggctcagcactaagagcaaatgcactctccaaacccctcctgaaagggcaggatggaacttacagttgaccaaataaatattttcatcaatttttcccagtcctctctctgactactttttgtacctttaatcctgctgaaaggcccaagagataggagcaggtttccttcctctcccttgtaaagtatgcatctgacatatgcagggccacctgtctgatactcccttggtatcccaatcaccatcatttagaaatcagtggaaattgaggcaaaaagagtctcaatctgatatcctgttataactatatcctggaaagtatataaactatgaaatttatttcaaagtcccataattcttcactaattcacacaggccttactctaataacacagcttgaaaaaaagttgctgtcaatggcagtgaacatgcctctttaaggattttctgcttttatcactctgcagctaaagaaagcatgactcaggtttgaatccatcttctacactttgctggcagaatgttactactaagatgaaaacttactgatgagaggatttctctgagtccattcctagtgctagacaaatagcttgggcaaaaaatgttgatgacgttgtgcccgacagagaacttccagagaaaaggttgagaaattgtattagtctgttcaaacactgctataaagaactatgtgagactgggtaatttatttttttaaaaagaggtttaattggcttatggttctgtaggtcgtataggaaacatggctgggggagcctcaggaaacttacaatcatggtggaaggtgaagaggaaggggggatttctcacatggccagagcaggaggaagagagaggcgggaggtgccacacacttttcaacacccagatctcctgagaacttagtatcgtgagaacaagggggaagccggcctccgtgatccagtcagctcccagcaggcctctcctccaatgctggggattgcaatttgacatgagatttgggtgggggcacaaattccaatcatatcagaaattaagaatcgactaccatgcaatcaagggacatggtcacatttgatactctagatgccagccagcaccactctaattagagaccagagagctttcattcagggcagttcctccttttgtttcaactccttgtagtgacttgggattggggagcaaaggctggaaaacctgtagacggggtttagcttaaacattgcacccattgagctgtcctcatgaataatttcagttagtctgtctccttgtagataagatgcaatcatgtcacccatggtgtcaccactctcattgggttgttagaaatatcaaaataaaattaagtgtgggaaaactcttgggaatctacaaagggctaagcagaatgaggtgttggcatcctccctgagaaggaaggtgaggtaatgataggaagatgagaggggcaggacataagctaaagggtctcaggactggcttatcccagctaagccccagcaggcagtacagggcagtctcaggctccctgcaccctcctcctgctcacaggggcagtttgtgatctctgagagacatgagaccttctttctttccatatcaaagaatgagaaattagatttctgactcactgccttccttttaggggagaagagggctctacgatgcggttgggcttagaggaaaatagcagctcctctgctgtgattctaggtctcctccctcccagagtctcaggatgtgcctccagagtagccaccatggaaatgacatgtgttcttccgcttagctaagcatgtgtatgtgattctatttaattaattattgatatttattaaaatacaacgtgtagatttctattttcattttgctgccaatacactgaaaaaagacatagttaagttccaatgacagaaacatatgtcaatatacaaatcaactatttgttgagttgagtattacatgaagacctaccgtgttgcagtgtgtggcagagaaaccatactttcctgaatatcatcacaaacctgtgaatcggatagattgctcctctaggcagatgcagtatctgatgaagtcaaaggttcttgccactcttcaccttagttttctggctaaaaagagcctggaaacgtttctacagaggaccaatgtcagccatgggatctcaaagatgaaaacaatttcctaaagacacaggttcttttctatgcaattattactgctgacgccagtgttgccccggcaagaaagatgataatattggtgaatatgatagctaaaatttactcagtgcttaccatgtgcgaagaattttgctaggagctcctcacatatttacatggtctgcatttaactcattcaatcttaaaggaaatgtatgaaatatgttctattattgtggctgtaagtgatggcttgagaatatgtctgcaagtctcttaacagttaatacttttttttttttggagatagtctctctctgtcacccaggctggagtgcaatggggtgatctcagttaactgcagcctctgcctcccaggttcaagggattctcctgcctcagcctcccgagtagctgggactacaggcggcaccaccatgcctgggtaatttttttatttttagtagagatgagtgtattactcagggttctctagagggacagaactaattgaatacttatatattcaattatatatatatactatatatatatataaagggcaaactaattgaataaagggcaaactaattgaatacatatactcaattatatatatatataaagggcagtttatcaagtattaacttaatgtacataatatatattatatatattatattttatatattatatatttatatatattttcatatatataattatatattttatatttttatataataaataaatataatatatatttatttatttattatatataatatatattatatttatttattatatataatatatattatatttatatattatatataatatatattatatttatatattacatataatatataatatatacagatatataatatataatagatatatagtatatataatatataatagatatatagtatatataatatgtaatataacagatataatatatatattatatataattatatataataatgatacatataataaaatatatattatatataattatatataatgatatataaaatatatattatatataattatatataataatgatatataataatatatattatatataattatataatatatattatatataattatatataataatatatattatataattatatataatgatgatatataataaaatatatattatatacataatatatatctattataaatatataatatatattatatataattacatatatattttttcatatatatatatatatatatatattaagctgggtgggcaaaatctaatcagctgccagtgcagctagaatataagcaggcagaaaaatatgaaaaaagagactgacttagcctctcaccttacatctttctacctcgctggaagcttcctgccctcaaatattggactccaagttcttcagttttggaactcagactggctctccttgctcctcagcctgcagatggactattgtgggaccttgtgatcgtgtaggttaatacttaataaactgccctttatgtgtatatatatattatatatattaagttatacatgtattatgtattatatatatttagatatattatatatataatatataatatgtaatatatataatatgtattatatgtaatatataatatgtaatatatataatatgtaatatataatatatataatatgtaatatataatatataattatatataatatataattataattatatattatatataattataattatatatta

SEQ ID NO: 202 - DNA, 4309 bp, Homo sapiens
gagcaagtggaatgtgtacaagagggagttaccatggaaacagcatattctcctggtaaccagaatggagttttggacttttttttccagaagccatctggatttctcaccttattggatgaagaaagtcaaatgatttggtcagtggaatcaaattttccaaaaaaactacaaagtctcctagaatcctcaaacacaaatgcggtgtactcccccatgaaggatgggaatgggaatgttgccctcaaagaccacggtacagccttcaccatcatgcactacgcaggaagggtaatgtatgatgttgttggggcgattgaaaaaaataaagactccctttcacagaatcttctatttgtaatgaaaactagtgaaaatgtcgtgatcaatcatttgttccagtcgaaattgtcacaaacaggatccctcgtatctgcctatccttcctttaaattccgaggacataagtctgccctgctcagtaagaaaatgacagcttcttcaattattggagaaaacaagaattatctagaacttagtaagttattaaaaaagaaaggaacttctacatttcttcaaagattggaacgaggagatccagtcaccatagcatcacaactcaggaaatcactaatggatattattggaaaacttcagaagtgcactccacacttcattcattgcatcaggcccaataactcaaagctgccagatacttttgataatttttacgtgtctgctcagctacaatatattggggtcctggagatggtgaagatcttccgatatggataccctgttcgcctttccttctcggatttcctgtcaaggtataagccactggctgatacattcctgcgtgagaagaaggaacagtcagctgccgagcgatgtcgacttgttctccagcagtgtaaattacaaggctggcagatgggagtccgaaaagtgtttctaaaatactggcatgctgaccaactcaatgatttgtgcctacagttgcagagaaaaattataacctgccaaaaagttatcagaggatttttagcacgccagcacctgcttcagagaataagcatcagacaacaagaggtgacttctatcaatagctttctgcagaacacagaggacatggggctgaaaacctacgatgccctggtcattcagaatgcttcagacattgcccgggaaaatgaccggctccgtagtgaaatgaacgctccctaccataaagagaagttagaggtcaggaacatgcaagaggaaggaagcaaaagaaccgatgacaagagtggacccaggcatttccaccccagctccatgtcagtctgcgcggccgtggatggcctgggccagtgcctcgttggcccgtccatctggtctccttcgctgcactcggtgttcagcatggatgacagcagcagcctcccgtctccacggaaacagcccccgcccaagccaaagagggaccccaacacccggctgagtgcttcctatgaggctgtgagcgcctgcctctccgcggccagggaagcggccaacgaagctctggcccggcccagaccgcacagcgacgactacagcaccatgaagaagattcctcctcgaaagcccaagcgcagccccaacaccaagctcagcggctcctacgaggagatatcggggtcccggcccggggacgcgaggcccgcgggcgccccgggggcagcagcgcgcgttctgacccccgggactccgcagtgcgcgctgcccccggcggcgcctccgggtgacgaggacgacagcgagcctgtgtacatcgagatgctggggcacgcggccaggcccgatagcccggaccccggggagtccgtgtacgaggagatgaagtgttgcctgcccgacgacggcggcccgggcgcgggctccttcctgctccacggcgcatcgccgcccctgctccaccgcgcgccggaggacgaggcggcggggcccccaggggacgcgtgcgacatcccgccgcccttccccaacctgctgccgcaccggccgcccctgctggtgttccccccgacccccgtcacctgctcccccgcctccgacgagtcgcccctgacacccctggaggtgaagaagctgccagtcctggagaccaacctcaagtaccccgtgcagccggaggggtcgagcccgctgtccccgcagtactccaagagccagaagggcgacggcgacaggcccgcgtcccccggcctggcgctgttcaacgggtccggccgagcctccccgccgtccacgccgcccccgcccccgcccccgcccgggccgccccccgcgccctacaggccctgcgcgcacttggccttcccgccggagcccgccccggtgaacgcggggaaagcggggccgagcgcagaggcgcccaaggttcacccaaagccaaactctgcccccgtggccgggccctgcagctccttccccaagatcccatattcccccgtgaaggccaccagggcggacgccaggaaggccggctccagtgcctcgccccccgcgccctacagccctcccagctccaggcctctcagcagccccctggacgagctcgccagcctcttcaactcggggaggagtgtgcttcggaaatccgcggcgggaagaaaaatcagggaagccgaaggttttgaaactaacatgaacataagtagccgagatgaccctagtacgtcagaaattacttccgagactcaagacagaaatgcaaataaccatggaattcagttatctaattcactatctagtgctataactgctgaaaatggaaattccatctcaaatggtttacctgaagaagatggatactcacggttgtctataagtggcacagggacttcgacatttcaaagacacagggacagtcacaccactcaggtaatccatcagctgaggctctcagagaatgaaagtgtggccctgcaggaactcttggactggaggagaaagctctgtgaggaaggacaagactggcagcagatcctgcaccacgctgagcccagggtgcctcccccaccaccttgcaagaagcccagccttctgaagaagccggaaggggcctcctgcaacaggctgccgtctgagctctgggacaccaccatttgatgtggcctgaactgcagacttacaaaatagaactgcctactgattccgggctgcaacaacagaaggctgccttctgacatgcgctggggcttctctccacgcatttagacaaaaaaagcacaggacacagacactaaatatatgagatcccgtgtgtgtgtgtgtgtgtttgtgtgtgtgtgtgtgggttctttcttatccatctcgtggtgatacactctgattttcaagctcctcatttacggctctgtgctacccctaggtagcaagagagaggctgggaaaagtgtggacgtggccagagcgagagagtagcggaggaaaggagcaatccatgcacactctgtacagttgtttttctacggttcaacagtctgtttattgtacttccaatggttttattataatacagtatacgggacatatattttatttctttgtagctacttgtgttttattggtattataaacctgataattatttacatgtttattactgtaattttataaatttatgcaattggtggtgcttcctttcttcaaaatacagattttaaaaaatcatttctagattatttttttcctccacagtccttttttttcacctaacgcacctaaatcttgaaactacattgttgttttagcttcgccagtgtcaccccttgcaaaactatgaattgagccccatgttttaggtgttactcatggatgaggaggctgttctttcctatgccctgtatttctggataagtggattgtgtaccctttagttaaatttcacctcccgacttcagcatagatcacaggaaatcacatggcacacggttaaacacgtatggcttcaaatccatagccggtggtgtaaaatgatcatattcattcaaaggcctacacagtacaaatgagcacgctgccatgtactggtttgagcagtaggggctgcatcgcacagcgctcgtcccccgggacttacactgcatgattccctcactgtatatcctcaaccctcccataatgcaaggccttgttcattgatgtgctttcgtcggctgtcggaaagttctgagcagtggctccagaccaccttgtcttgctacttggaactttttattcataccagcctttgaaaagttactgtgccaataaagaggtacaactgtgttcttctatt

SEQ ID NO: 203 - protein, 1018 aa, Homo sapiens
MAYSPGNQNGVLDFFFQKPSGFLTLLDEESQMIWSVESNFPKKLQSLLESSNTNAVYSPMKDGNGNVKDHGTAFTIMHYAGRVMYDVVGAIEKNKDSLSQNLLFVMKTSENVVINHLFQSKLSQTGSLVSAYPSFKFRGHKSALLSKKMTASSIIGENKNYLELSKLLKKKGTSTFLQRLERGDPVTIASQLRKSLMDIIGKLQKCTPHFIHCIRPNNSKLPDTFDNFYVSAQLQYIGVLEMVKIFRYGYPVRLSFSDFLSRYKPLADTFLREKKEQSAAERCRLVLQQCKLQGWQMGVRKVFLKYWHADQLNDLCLQLQRKIITCQKVIRGFLARQHLLQRISIRQQEVTSINSFLQNTEDMGLKTYDALVIQNASDIARENDRLRSEMNAPYHKEKLEVRNMQEEGSKRTDDKSGPRHFHPSSMSVCAAVDGLGQCLVGPSIWSPSLHSVFSMDDSSSLPSPRKQPPPKPKRDPNTRLSASYEAVSACLSAAREAANEARPRPHSDDYSTMKKIPPRKPKRSPNTKLSGSYEEISGSRPGDARPAGAPGAAARVLTPGTPQCALPPAAPPGDEDDSEPVYIEMLGHAARPDSPDPGESVYEEMKCCLPDDGGPGAGSFLLHGDPLLHRAPEDEAAGPPGDACDIPPPFPNLLPHRPPLLVFPPTPVTCSPASDESPLTPLEVKKLPVLETNLKYPVQPEGSSPLSPQYSKSQKGDGDRPDGLALFNGSGRDPSTPPPPPPPPGPPPAPYRPCAHLAFPPEPAPVNAGKAGPSAEAPKVHPKPNSAPVAGPCSSFPKIPYSPVKATRADARKAGSSDPAPYSPPSSRPLSSPLDELASLFNSGRSVLRKSAAGRKIREAEGFETNMNISSRDDPSTSEITSETQDRNANNHGIQLSNSLSSAITAENGNSISNGLPEEDGYSRLSISGTGTSTFQRHRDSHTTQVIHQLRLSENESVQELLDWRRKLCEEGQDWQQILHHAEPRVPPPPPCKKPSLLKKPEGASCNRLPSELWDTTI

SEQ ID NO: 204 - DNA, 157411 bp, Mus musculus
  misc_feature (1)...(157411): n = A,T,C or G
gtgtgattgtgattcttctggttagaaaaccattacaggagtgcaaggtgatgtgtggatacagctctaagcatgcccagcttaccatcaaataacacccctttccctcatctgcctggtgatcttacgtctggcttccatttcatcatgccccagtgggcacggtgggtgggctggcagtcacattagacctgactcagagctcaattcataatgaaatgtctcctgtagacactggtggtgacatcccaggaaggtcctgactaagggaccagggaaggggatggccctgctagcagagaggatggagggagagttgctttgccaactaaaccctggttttgggttgtgtggtttaaatctgaaagtcaggtttgcttttccaggtgcgtcctggagcccatgtgattggatcaacacgggctctgtttatgatggcaacagccacgaacttcagtgccaagaggaaactttccggttctgactcaggcggtccctctgctttgggctgatgctgttattcaccccagccgggaaggctggaggagggaggtgcaatgccccaaggtgttctaccagaccttgggtcagctgcctcctgctgctcggtgattgacaaatggcatcttgtccagtagccttgatggcatggtgccatcatcctccgtcatgcactgtattcacctgagataagtatctcatgtatgagtttccttgttatggtctgtcttccctgacagaatggaagagctacagggctagtcaccccccccccccttaccctctgtgtgtgtgcacctttctgccttttgtgggtatatgtagtgaatatatacccgtgcgtgtgcatgtgtgtacttgtggagaccagaggtccacattaatttaaagcttatttatttatatgagtacgctgtagctgtcttcaaacacaccagaagagagcattggctcccactatggatagttgtgagccactgtgtggttgctgggaactgaactcaggacctctggaagagcagtcaggctcttaaccattgagccatctctccagcttccatgctgagtatcttactcaatccctttccactttatttatttacttatttacgtatttatttatttacttatttatttttgagacaagggtctcttcctgtacctggaactcaccaattctgctagaatggctagtcagcaagccaccaagagtctcctatctcacctgccttagcacaggttgccatacccagcttttacatgggctctggagatttgaactcacatcctcatgcttgcatagcaagcacatcactaactgagccatctccctaacctctttccccttcccccactctctatggtccagactgactctgaactcagcctatgaccctgactcagtttcgaaactgctgggttataggtttatgccaccacacctcacgtctgtgtccatttttcggatctcagcttctggaacattgccctgcatacagctggcatcaggttcatgtttgctgcttactgcatggctggcaccctcctttctcttcacagaattctttctaagttgaattctgttcagtgtgccaatctgctctaagactgctgtagctcccgattgccttagcaaggttctgcagaccctgcagaacccaaggtctggtttactgaatggcatgccttggctacagacacccttcgttccagccccggtgagtcccttcccagggtgtgacatgcctgctgttcctgcttcatggaactctcttgtcacctcttaacccctttcaacccacatactctgtcctttgccaggctcagattaaggtcaccacctccaggaagccttcctccctcttcccagcctgctttggccctgttcttcccccttttcttggccaatcaggttgttatcaatttgttgcaatcatctttaaaaaacaaaaacaaaacaaacaaacaaaaaactctttacaaaacttgctgtgtgcagctctggcaagattgataacttactacataccccaggctgaccttgaattcatgacaatctttatttgtgatggggtttgatgccttcttctggtgtgtctgaaggcagcaacagtgtattcacacacataaactaaataaataaaatctttaaaaataaagaacaggatctgagccgggcggtggtggtgcacacctttaatcccagcacttgggaggcagaggcaggcagatttctgagttcgaggccagcctggtctgcaaagtgagtaccaggacagccagggctacacagagaaaccctgtctcgaaaaaaaccaaaaaaccaacaataataataataataacaacaacaacaacaacaaaagaaaggaaggaaggaaggaaggaaggaagaaagaaagaaagaaagaaagaaagaaagaaagaaagaaagaaagaaagaaagaaagaaagaaagacagacagaccaggatcagagctggaggatcaggctcccagggaaggcccctgcctagaatcccccagtgaggggctgggagtgtggcccagtggcagagtgcttacctagcacttaggactctgggttccattcccagcactgcaaaaacaaaagcccaccaaatagcaaaccagactgatactgttcgtttgtaaccccctgattacagcatctttcatttcctgtgatgtgttgttatccaccctcagtgggctttggcaatcgccctccttgctgggtatgaatactgtttgcccttcattagttgagagacatgaagggtgatcctatggttgccagcaattatgcatggaactcctgcaaacattactgtttagattatttcatgtatgtgtatgtgcatgtgtatgtatgtaatttcatggatatatatatacatatatgcatatatacatacatacacacacacacacatatccatgataatgtgtattacatctgataatgtctatatagttttctacaaactgcccagctgttttccaagaggctgcaggctctgtgctttctggctgctcgttgcacatcttccctgccgtgagcacagttgactctgtttctctctgctctccctccctcttgttaaggtgcacccgtgtgctcgtgagtctgtgcacgcatacagaggccagaggtcaacctcagccatcatctcccaggatctagccaccttttcattgtttgtttgttttcctgagacagggtttctctgtgtagctctggctggcctggaacttgctccgcagaccaccctggtctcaaactcacagagatccccctgcctctgcctcccgagagctgcgattaaagatgtgcaccaccactgtccagatatccaccttgttttttgagatacagtctcttactggcctggggggctggggttcttgcagagcaccagagttcggttccaggttcccatgtattcctgatctctcaatggggctctcttcccaggtggttttagcttctgccaagttgaccattgaagataacggatggcaacactgcacaatcaaagaggcaggcagagggaacaggctgagctgatttcttcctctgactcacttcatggtccttcttgagacccaaggaccctgagcactgcacgtgtgatgccatttcccatttcccccctcccccacccaccaacaactctcttgtttggtcatatgcccacagcagtccttacatgaagcgggggaaggggcatatctcaagcacccagactaaggaggaatctcattcctgcgagagagttgaggcagctggtacttgagacccagttatggcccatacgaagcctttcagggaactgctgtctttggggctctttaaagctctatggatggagtccagtggccaaggatggcagacatggagagagccttttacatctctgctacccaaatacttgacaaaaacggccccagggaagagggttttgctttgtctcttggtttcaggcactttcagtcattcctggcagggaggactttggtggtgctcctggtggtaggtgttagggacataggcgactcccaggcagaactcaggactggtctataactctcaaaggcctgaccttcgtgacccacttcctccacccaggcctcaccttttaaaggttccacaggcttccccaaataatgccaccaggtaaggaccaaggatccaaaaggaacatgtaggttcctaggttgcttttgtcaagatgtaatatcacagccacaggaaaagaaaattaagacattgggtttatgaagtgctgggggtagaactcagggtctcttatacgccaggcaaacactctatcaactgagctacacccccagcccctccctctctttgatttttagacgctgttgtatgtgcgtatgtgtacatgtgtgtacacaggtgtacatgtgtcatggttcacatgtgtaggtcaaaggacaacttgtgggtattgttctctctgtccatcacgtgcatcccaggaagtgaatttaggtcaggcttagaggcaagtatttttatctgccaagtcacctttattttattttacttcttttaaagatttatgtatttatttttatgtctgtgagttcaccacaccagaggagggcatcaggtcccattacagatggttgttagccaccatgtggttgctgggatttgaactcagggcttctgggagacctctccagccccttctttttgatttttaaagaaaggttctcgcacctttaatcccagcacttgagagacagacacaggtagagctccttaagtttgaggccagcctggtcaacaccttgagttccaggacagccagagctacatggtgaagaccttgtttctaacaaaacaaaacaaagcaagcaaacaaacatagaagatctttgcgtataccccaggttggcttccaacttatcattctcctgcctcaattctggagtgctaggattacaggtatgtgcaagcatgactggctaaatatctaggttttctagattgtaagccattgatcttgacttcacatgtagaagcttgcctcttggcacagcgggccagtgtattgattgcttctgtccttggatgaggattgcagtgtcacctattcctaggatcctgttgaaccaggaagagttcctaggatgcgcccagcccagagcctgctcatctgactcatctccctacacagcagccctattccccagtgggggggggggggggggggatgaggcttacaaaagtcaataattcctacccagaggaaacttcagtcccccaaactccaaaaggcagtcctggtctacagaaggatttttggtggttaaacaaagccggcagccctcaggcgcgtgtgaagcccggtcccctctctaccaaatggagctatctccactcttcactggcagaaaggacaataggctattcctggtgcctattagcataccaaagcaccgactggcctccgggctcccaaagtaaagcacctgtcacacatttcagagttcatgctgacaccctaacccttctcatcccaaacttcctctagtccacagtctccgcctcccaccagccagcgactcaatctccttataaccctgctatttttgttgtactttttatatgcgtctctcttcattatggttttactgctgtgaggaggtaccacgaccaaggcagctcttataaggacaacattttaattgaggccggcttacaggttcagagggtcagtctattatcatcatggtgggagcctggcagtgtccaggcaggcaaggtgcaggaggagctgagagtttttacatcttcatctgaaggctgctagaagactgactcccatgtggttagaaggagggtctcattgctcactctccacagtaacacacttcctacaacaaggccacaccttctaatagtgccacttcttgggccaaccatattcaaagcaccactgtgtctctctctcttttctgtcccccacttcttctcactcttctttctatgccccccatacacacccacacatgcacccccccacatacacacataccacacacacacacaaacacacacacacaccacatacacatnnnnnnnnnnnnnnnnnnnnnnnnnnnnnnnnnnnnnnnnnnnnnnnnnnnnnnnnnnnnnnnnnnnnnnnnnnnnnnnnnnnnnnnnnnnnnnnnnnnnnnnnnnnnnnnnnnnnnnnnnnnnnnnnnnnnnnnnnnnnnnnnnnnnnnnnnnnnnnnnnnnnnnnnnnnnnnnnnnnnnnnnnncacacacatgcatgcacgcacacacgcacacactcgcacacactcgcactctgtttctctcatggctaaggccattctgagggtaatgttctttcttccctctgctctggactcttccaggggcctctggcatctgactattctctctcacatctacaataaaaacctttgcttcaaccataccaaggaacagtcatgtcgtcagtgtctacagggccttacatgtgtgaggactagaacttgggaccgaaacctgactcagggctcccttttgcatttcgccctaacccgctctgagctcattggattgggctgtgatggttgctgctgttgtagagccctgcctgtgttggttggatggctaaccagccttgtctcagcaggatccctggctgagaaactggagttctgcaaggtgagcctcaaagctagaggtcctccctactctgcctcagtgtcagagagctggactaccctgctgtggcagctgccaagtttgcaaaccagttctgggtggcacttcctcttcctgaggtccaacacactagaaaaatggaattcagtctgtccccaggggctatgtactttgaacaatgccaggaaaggaaaccagactcaaaggcagttggggtttttcttgttgctcttggtggcaggggccgggggttaagatgggtgaggccccaggggcaaggtagttagtcattttgaccgctatgggggaaaaggatgcccaggtttgacaggcccttcccaactccaataagcaactgtggctcactggtgtgtttgtgctgggtcaagcacatcacactttgagcctgttaagccaacagcccctgtgcgatccacttgctacactatttctcagctaaggcatgatattccagggctttggtgtgctctactccggtggttctcaatccatgggtcccgacctcgttggcaaccctctatctccagaaatattaacaccgtgattcctgacagtagtgaaattccagttatgaagtagcaaggaaaataattttatggcttggggggaggggaggtcaccacaacacaaggaactgtattaaagggttgaagcatttggaaggttgaggactgatgctctacagcaaagagaaggggttgactctcttctctgtgacttccttgctctccccactcccttgtgtttagtgactttgagccttttttgcattaattttcttcatttatttattttgtcatttatttcataaggcagcctgggagtgtcacagcgcagctgtggagatcaaaggacagctacgttgaggtcagttctctccttccaccatgtgggtttcctggaacacagcacaagttggcaggttcggtggcaagtgcctttaccctctgagccatctcacatgagtggatggaaagatgggtgccccataatcaaggctggaaaccttctctaagggcttctctagggcttctgtcccatctctaagggaagaggaggatgctgcagtgaagtccaggtgcacatgcacacacatgcacacgcacacacagacacacacagacacacacagatacacacacacaccaaacaaaaccaaccaaccaaccacacacacacacacacacacacacaccaaacaaaaccaaccaaccaacaaactaacacaaaccccaaatcacatgtgatagctcacaactataattccaacagtcaggaggcagaggcaggaggatctctctctgtgagtttgaggccagcctgggctacacagtgagtttcaggttggccagtgctacatagtgagatctcatctcaaacaaacaagaatacaatcccacaaagataatatatgttgaagttccttaaaaaaataccaaagtgtcatatagtcattatttcttttttttaagatttatttattattatatctaagtacattgtagttgtcttcagatgcatcagaagagggcgtcaaatctcattatgaatggttgtgagccaccatgtggttgctgggatttgaactcaggaccttaggaagaacagtcggtgcttttaaccattgagccatctctccagccctagtcattatttctgagaagaggcccgtgtttcatgtgtttgatgtcatcatgatctctttcatgagtgatttagtggtggcacatgcctttagcctcagcaccagggaggcagatctctgtgagtttgaggccagcctggtctacatattgagctgcaaggagacccttaaggagaccctgtgtctgaagggatacatacctgttggatggtgattggtgacaagaacaaagccagtggccactgtgctgggacagctgtaaggtggctctcagcatgaggttggtaaagtgctgacctagtgcaggacatctgcgggggtgggatgaggtggggggacacaatgtaaaagggaacagtggcaaaacctgtaaactgagccccggggagttagaggcaggaggatcagaaggttggtccctgctagaagattgaggtagcctgggctacataaaaccaagtctttttgtttgtttgtttgtttgcttgcttgtttatttatttatttatccttcaaaacagaatttctctgtgtggctctggctgtcttggaagtccttctgtagaccaggttggcctcaaactcaagagattcacctgcctctgcctcttgagtgctaggattaaaggcacccagaagaaaccaagtctctctctctctctctctctctctctctctctctctctctctctctctctctctttctttggacagggtttctctgtgtggctttggctgccctggaattctccttgtagaccaggctggcctcaaattcacagagatctgcctacctgggcctcctaagtgctgggattaccagcctgaaatcaaatcaaatcatcaaatcttaaatctctctctctctctctctctctctctctctctctctctctctctctctctctgtcagaatggagaggtggtttagcagttgagagcacatattgcgcctacagagactggagttcagctcccagcaacccacatagccacaacagcctgtgactccagcttcagagaatcctatgagctctagcctccctgatcccctgtattcacagaaatggattcacataaacacacacatatacacataatttaaaaataatattaaaaaaatttttttggacacagatctcactgtatagccctagctggccttgaactaattcagagatgtaattttgtcattctgccttcctagttatgggattaaaggtatggaccgttaagcggaaaaatacatttttttttccccagaaaaaaaagcaacgagttttaaagaacacagtcttccaatttaaaagccaagatttcagttctctagtgcccagttactctttgaaacaaacttttgagcctggcactgttttgcagagatggaaactgaggctgcggcatttaagataggaaacaatgtactactaaattcagctctgtcaaccccgagtgggtgaagataatcaatgcatgcatggtatctgtatgcagtaggcgccccataaactctgatattcttgggaaatttctgttctcttggctaagcgatcgcggccaggcaggtggtactggggctgcctcagtttccccctggtcgggcaaggcatgactcttttaggatgctctggcgggtcgggacccgccttgagacagggcggcgcgttaaggggggcggccccgaggagtcacgtggcgcggccgcctccaaagcagaagtaaggagcgccgctgagcaagacctgcgctgccggactgcccgggccccaggcggctgctgcacgagggacccccgagtccccccaacccgtggctggcaggcccagggattgtgcgggtggctgcgctccgggggtaccgccaggtgagtagccaggatggatggagctccccggggacttgcgcgtgtgcggggaccctagagctggcaccgcgttgggtggggactgcgccggagcccaagagggcgcgggcagggctggggtgcgcgatccgggcaggtggccgggtgtgccctggggaacccttgcttagggacagccgggcccggcccagccgccggccacttcctctcctggggctggcgccacctctccagggtgagcagtggccaactagggtttgaatgagagacgcggctccgggtgctggggtggccgaagcgtctacctcgccaccgagagtcctacgcgggagccgcgtccctgcttgcggggacttgattttgaacagtacttcccagtagtacacaggtggctccggggtggggcggagcagctctttctccacacgcgattctgggacccgcccctcccgcaattcagttcagtttggggatctcaaagaggtcatttgcctcgcggggagccagaattcgaagggaaggtgggttgtatccggacctaggaggttgatacctggaaagtcaggagcaggccctgtccgtaccctgatctcgaactgttgagagagaggctggcagggcgaggggccgacacgccctggaaacaggtggctttctctctgagacctaaatttgaatttcagttccatttatgtgacacagcacacagagaggagcccccccacccccaccccccgagtccaggtttctctcttgggtcccgtactagaccagagcctgttttccggggcatcaaagagactccctgcagttcctgaccctggtggcaaaggcccttcctggtgggcacaggtcatggcccctgctctttgcttctgcgggacacttacaggatgttggggtcgggactagccctaggctgttacccattttgcacggttgtgggcagcagtgtagcagtcccaggggattttggctgtggatttttattgatgcttaaaattactcggtgcttggcctcccaggcaaggcggcgtgtgtggggtactctgaaggagccccagcggggacccttttgcacctcctgggcgaagttggtgggaagttactggtgggaaaacttctgcaaataattaatttcgaaaataggcaaccctctccctgccctgtctccgcaaaagggcttttctgtttcaactaacagagtggacccattcatatgtcttgtcccatcctctctcattggccccctctagatttacaagcaatgctttcgagatatatatatatatatatatcactaataacatttatattataactcattaatttgtaagtttctttttttttaaatcaaaatagctcacaaatctcccaagatcaaaattggcgtgtgataatttataaatccactcttttccgtagcttctgtacattttaaattttttaaaattatttttgagacaatctcattatatagttcaggttagccttgaacttctgatcttcctgtgtccacctcccaagtgctgggatgatcagtgtgtgccaatactcttggnnnnnnnnnnnnnnnnnnnnnnnnnnnnnnnnnnnnnnnnnnnnnnnnnnnnnnnnnnnnnnnnnnnnnnnnnnnnnnnnnnnnnnnnnnnnnnnnnnnnnnnnnnnnnnnnnnnnnnnnnnatcccccaccgcccacttcccagagatgaggagcccaagtgtttctggttttatggtcctgtaaggatctttccggatgtctcattttgcacaagagtgcttgctggatcaactttatactttagaggtgcttaccagtgcccttaaaaaaaaaaaaaagtcaaccctgttttcacttccacgtgtacaggtggacattgttggttcttggattggaccttcccatgcttttaggatgaccgtcaaatgaaccccgatatccctggtgcagtgggaagggcaggcaatattcaagggttcagctggtccaaagtctagtagaattcttccttgggtttttggctgaaatccagcactgacccacatgtgcagagactgttcaagagatggatagtccctgtttcctgttttggggttcttgtgtgtgagaagttggtttcaaagtgtgaaggacatagaaacgtgaaaaaaaaaaaaaaaaagaaaagaaagaaaagaggtttcttcccagcaccaccagccatgtttgtactgactatgtgagttgatcaggttacccatagtaggggtggagggaaggggagtccaggctaattcattcattttggaaagaacaaaacagaagcaaagagggagttatcttgatggctagggccctgctctgggaatacagtcagctggaggagaccttcttgccttgggcgttggagcttggaatactctgcctgaactggccactgcctggtgccctgtccagaatctgtttccagtgtggtgttgcttcagggcttgggatcttgctgggggaaacctttcctgggcatctaacagtgagaaacagtggggatgccaggatggagcattctgtatagtgcagaactgtgcaacggggacctggatcttccactttgtaagctgggtgaccttggacaagccagtccccctacccactcttcaaagagtcggccagttttgttggcatatggccaagtactgccagcattctgaattcacaaaaagcaagccctgaaaggatcagaatcatatgactgtctgtctgtctgtctgtctgtctgtgtgaccttggtcatataatttcctcctctctggatggattttgatttttaaagctgtcagcttttctccctcttcccccggtgctaggaattgaactcaggacttggctcttgttgggcagatgctctacccctgagctgtattcccaggcatggcatgtattggtctataaggtacctgagggtaaaccggtgtcatgtctagagagttttataataacagctactttccagggggcctttgcttctgtcccgtccccccccaacgatgaactagcctggaaactcccctctctcatctccagtggctagcctgcttaactgatagtgtcaatataaatagcgcgtttggcatgggtagctcccaagtggacaggagagctaagagtgtatatatatcttgtgaggtcacatcctggcttgtgttgaagcctgttccccaggctagatgactgttcctctaccagcttttcactctgtagcgcaggctggccttggattcttagcaaccctcctgcctcagcctccccaagtgctaggattatagctgggtgccctgttgtgtgtttttatctcattttcacagggtctagtataagtcaagttggccttaactgtggatgaccttggacttctgattttcttctccccacctctcttgtgttgggcttatggtctatggccaccaaactctctcatgtggcactgagaaccaaacatgctaggcaagcattctatccaccgagcctcacccccagtgcctcatctttttaccaagatggaactcagaagccttccttcctcagctgatttctcttgagtcctttaggcctcaggtggggggagggaggcagaggagggggnnnnnnnnnnnnnnnnnnnnnnnnnnnnnnnnnnnnnnnnnnnnnnnnnnnnnnnnnnnctctgcactgctgtttcttcccaagccataggcagggaacaggtggagacaatgcctccccatggccagctctcccacctaggagcctttctgccttccttcgagcaaagggcaaggtctgagcctctccctgttcgctgacatttgcatcctagttcccagcccaagcagagttgatactcagagctccgatcacctggctgatggatagataagcatccatcagtcagtgtttagttccccaaatcacaccatccatacctcagggtattttgtcctcattttgcaagtgacagggttgaggttcagagcaaattgcctagagactgagcagattggaggcccccacagtcctagtccaaggcctgcctctcacttcctgttctttggcctgggtggaatagctttctagtgctgcttggtaatcctggtggatacaatgacaactgtgggacctggcaggaggagctgaggttgtcacacagttccactgagcaccctcttagttgattttaaaaaaaccatatttatttacttattagtatttactatatattgttatatgtgatactatgcaatataattaattatattatttatttatgtacattggtaggtttgcttttgcctatgtctgtatgagtttgtcagatcccctggatctggagttaagcaatacagttgtgagctgccatgtgggtgctgggaattgagcccggggcctctagaagagcagccagtgctcttaactgctaagccatcctctccagcccctaagttgacttttttttaattaaaaaaaatatatatgaatattttcctgcatatatgtattgtatcatgcgtgtgtgcctggtacctgaggaggtcaacagagggtatcagaccccctggagctggagtttggtggtcttaagctgcctgacatgggggtggggacaaaatcctgatcccttgcaagagcaacaagtgctcttaactgctgagccatctctccactcaactctttctctcctatttttttgagatactgtcttgtgtagcccagggtagcccctaacttactacgtagctgaggttctacactccgcttccatgcattaccacagctgacttgtgcccttgttttaggggcctgggatgcatagattattttatttaggtcttacaaagtcttcaggaggctggtaacattgccgtcctttgcatggctggaaatgaggtcgaaagggtgtggtgtctaggtacaggtgcacctatctccgcatccagcaggctcaaggggctttgagctgagaagtgatgagattgagtttgcgttctgaaatgctgccagccactgggctgagaacctcaggggctcggggcaagaagctgggtacagcagagagctcctcggaggagccagggagagggaagaatgcttggattctgaatttgcccgttgttttgggggtatgagaacgtccagacaatggctgggatactcgcttaagcactaactgcccgtaggagggcgctgctccaaagacacttgggtactctgctttgctgtacacgggaggctgagggttgccctctgggcttaggaatcccttgaggagggatggaatggaagcagaggtgtggagaagccaccattagtaggggggctgccaggcctggacattttctacctttttggtctcattgttatgcagaagaaccagctgttctcattttttgttataaatggatggttaggctctagcaggttagatacggtgctggagagaggttaccgagcctgtcagaacggctttgcttattcaaatttggacaagaagagagggtggagatttggttattcaaagtctgtctagcggtggggagggtcaaggaggccaatagcccccctcccccatctccacccagactttatttaaacctgcgctctctaagtggccaagggctctcagcactagaaccttcacctataacttcacctataacagggtcttggctactgacactccagtcacacacccacctcagttcattaaagccagttcactcttttatcccccccccccccccccagcctccatctttctcctgcttctcccgtctccctggagcggctgacaatgaccaccatggtcaacgtggacacccttccagaatatgagaagagtcagatcaagagagcgctggagttagggacggtgatgaccgtgttcaacgcccgcaaatccaccccagagcggaggacagtacagatgatcatggagactcggcaggtggcatggagcaagaccgcagacaagattgaaggcttccgtaagtacttgctgggcagagcagcggggtccataagccctgctgcctaccagagtagcatctgctcattcaccctgctttatttaaacccgtctgtcaggatgagtgttgatttggtccattcttcttttaaagatttattttatgagtacactgtcgttgtctttagaccctccagaagagagcatcagatctcgttacagatgggtgtgagccaccgtgtggttgctgggaattgaactcaggacccctggaagagcagtcagtgctcttaaccactgagctggctctccagcctcatttggttccactttgtgtgggtgggggcggggtgaggttgagatcaggtgggggaagttgatccagggaagttcttgtgaaacgacagcaaccccagttggtcaacttggccctgatagtgaaacagaagtggggatcacctggtcccaaaggtagcgagctgtctgacttctgacaggcctggggaggctgggggcttagtagccaaacgcctaacgatttatttattttgttgcaaaccacagcagcaaggagctctgtgtttaaaggtacagggaaggagaaaaaaaaaaaatcagttactgtttgcagccttcagatgaaattctggtcctggtggctgtgccttctctagtcaccttatactgggctgttggctcagttctgggactttctgaggagattgtagcaaacagagttttcagttgcagatgtgtgctttaatttgatttcttaccaattagcgtgagtttgtttgaagtttatttgttcatttaagtgtgcatgtgtgggtgcgtgcacgctcatagcattcgtatgagggtcagggtggggcacttgtgggagttgcctctcccctatgtgtggattctggggacagaactcaggctatctggtttggccacaagcaccttcacccactgaggtgatcttgcccgccctctttgttttagaagggtctcatgtagcccaggctagcctggaacttggaaagtagctgaggatgactttcaaccggcgatctccctgcttttagctctcagagctggggagagaggtgtgcacctcaacactgctatgtatgtatttatttatttttatgctgggccaggaatggaacccagcgtttgtgcataatagacaagcactctgccaaatgagctatgtccccaggtccgtactgaaaagctcacatgatttttccttacagtaatttctttacttgtgtgtatgttatggcatgcgtgcacaggtcagaggacaacttataggagttgatcctctcctcttaccatgtggggcctggggaatcaaacttaagtcgtctggcttggtggcgagtgccttttcccatggagccctcgtggcaggtccctgactagcttttcatagaaaaattataatgtacttttgaaatagcagtgctaggagttgaggcgggaggattgtgggttcactgtggccacatagtgagaccttgccttaaaaatgaagtactgtgagaagctagagaattaactcacaagtgcctttcacctctgaccctctcttcacctgtatcctgcataagcgctgacctagcttgttctctgttgctgtatatataccatgaccaatggcaaataggaggaaaagatttatttcagtttacaggctacagcccatctttgaggaaagccagggcaggaactcaaagcagaagtgaggagacaccatgggggtagaacgcggcttaccaatttgccttgctatctctggcttgctcggctagttttcctaggatgacaccgcccatggtgggctgggcccttttacttctattagccatcaagaaaatgtcccacagacagggccacagggcaatctgatagaggcaattactttccccaggtgactctgggatggagaggctttacagctgaagctaagggtggccagctcattagtcgtttagtcttctggtaatagtctgccttcatgtgacaggtgtgtcttaaatatttcatataacctctgctccttggtttcttttcacctggggctggttccttatcagcacacgttgatctgcctcttgctttcacgggcctggctgcaccgtggcagtttaacccggagtgggacgtgtgctgttccctgccatttgtcaggaactgcagcagtgggtttttgcagtcttcttaaaaagtaagtcatgtttttattgaaacaagatcgacttaacacacagtttatggttcaaagagaccctgcaaagccgggtgtggtaactcaaaccagtaatcccagcctctggaggttgaggcaggattagaggattatggattgaagagaatcttgagccaggtagagtggcatgcgcctttaatcccagcgcttgggaggcaaaggctggcagatctctgtgaggtagaggccagcttttctacatagtgaattctaggacagcagggttatgtagggagaccctagagagagacggagggaggaacagagagagagggaggaagggagagggagggaaagggagggagaggaagggagagagagagatgctgagctacaaaagccaggcatggtggcagacacctgtgatctcagggctggccagccagggtaatgacaatcggtgaggtgcaggttcagtgagggatcctgactcagaatataaggcagggagcagcgaggagacaccagtcactgccatccacttgcaagcgcagagcacatttaatcatttgttagcatcagcatggtcagttctggtacactttcagtaagtggcacttacctcgtcccactgacccccttcctccatcactccnnnnnnnnnnnnnnnnnnnnnnnnnnnnnnnnnnnnnnnnnnnnnnnnnnnnnnnnnnnnnnnnnnnnnnnnnnnnnnnnnnnnnnnnnnnnnnnnnnnnnnnnnnnnnnnnnnnnnnnnnnnnnnnnnnnnnagccctgaatctactttctgtttctacaaatgccatttatagaaggctgtgttgtggccatttcatggacagggaatcgtaattttggcttttgcatgtggcttctttctgcttcgtgtcttagaatttatccacattttagtgagaaacagaatttgattccttaagatatccaggcaatacgctacaggaaattagtctatttgctaattttaggtcatttatctgttttcccgtctcttatctaatccgaagagcgtggttctgagcatttgtgtgcaggtttttaaaatttatcctggtatatgtgtgcgcaccttcgtgagttcatgtgcatgtgtgttcaggtccccatgggcacctgagggtcacttgatgtgggcgctgggaattgaacctagatcctctgcaagagcagtcagtgctcttaaccacagagagagccttctctccattcctggtgtagaggttttgatgtaggtccttgcgctgccccccaccttcacccccctcccgcccctgtgcttaatgtgaaatttaggtgtcatatgcagtgtgtgtgggatgctgtccttgctttctttctgcatacaagctgtaggcgcctcatgccagggtacggtgtgtttccgccttatagggggaagttggtgtcactccacaaaagcagcagctttactttgcattggagcctcgaggtctgtccccacaccttctcctgcactgccactgacttctgtgcttgtccattcactggtcaagctgagcgattctgcatagtccttcctcccttcctcccttcctctttccctccctcccttccttgctttcgatttatttattttatgtatatgaatacactgtagctgtcttcagacacaccaggagagtgcggtccaatcacattgcagatggttgtgagccaccacgtggttgctgggaatcgaactcaggacctatggatgagcagccagtgctcttgaccactggcccatctatccagccctctgcatagttcttaataatttttttttgtttttgtttttcgagacagggtttctctgtatatccctggctgtcctggaactcactttgtagaccagactggcctcgaactcagaaatccgcctgcttctgccacccgagtgctgggattaaaggcgtgcgccaccacgacaggcaaaaaacctttttttttaggaaacaattcattatcacaatctctctctgtctccatctctttctgactgtttctgtctatctgtctcccattctgtgtgtgtgtgtgtgtgtgtgtgtgtgtgtgtgtgtgtgtgtatgacacaacctgttactgcctctttccttctcaacctactttagtttggagatagctctgccaggtacctaacagagctctggcagttgctaaatactatgtaaatctcctggagcccacagcgtcctgctggggaccagcaggcgcttgccttctgttagcttggcctttccatgtttgcatagctttatctgtattggttgccactgcacgtgctatggctgggagtgaggatgaggagtctcatcaggggagctctcctgccccacagcatctgataacccccccccccatgctcctcctctgattcctgcatcctttacagtagaaggaagactcactgctagtagaagagctgccttgtgtggagagtgaggggcaggatgtgccagccggccagtgaggatggcacattggaggaggcactgtgggagccacagatgcaaatgagcagattgtgggtcagatctggagagggttcagttgggtcattgtggcctagccagagggacttgatgggagtgcttagctatcgtggtttggggtcgagtggtgatgatgatgatgatggtggtggtgatgatgaagatggtggtggtggtggtggtgatgatgatgatgatggtggtggtggtggtggtggtgacattgaggctgattgtgattattgtggtggtgatggtgttgattggtggtggtggtgctgatgatggtgctgatcgtgatggtggtggtggtgctgctgatggtctgattgtgatggtggtggtagtgattgatggaggaggtggtggaagagactgtagtgataaggatgatggtgccagttgtgatggtgttggtgacgatgatgatggtgatgatgttcatgagagacagctaatgttcagtgtgtgagtaaacatagcctgggtgagagattgcgaagtcagtcttcatgatgattaaacagtaggaattacacccgtgatgaggaggattacgtcctgggggaccaggtgacatgtcacacagtacaggaataggctggagggcttaaatcttcctgctgtgttgtcactgtcttcatcactagctcaagcatgctttctcagtctgtaggcagcataagtttccggctggaacccagaatggtgatctcgggtgattgccacagcagggggaaagaccacaatccccgtatgcagaagccactccgttgagtgcctggatgtgtgggaagactggatggaggatgagtgggaacctaatcaagtgtgcaaatgggtccattcttggatgttgtactggtttggtttatgtcaatttgacaaaagctaacgttgtctgagtgaagggaatctcaactgagaaaatgcctccataagattgggccgtaacaaggctattgattgcttctcacaaacttatggctagccccagttgctgaagtcaacacctatataactcattgaacttggagaaattgaactggtgcctaccagagttagttgtcactggttctgctgactagtgttcatggtgctggcaggtatccttcatgctatccgagaggaaaggcaaacattaacccagtcacaaatcctttgatctaccatggctatctgcctaaaagatacacaggtgtaatagcggcacaaaagttgtaggcgtaaccaaccaatatctggatttaatgagatggaatccaagcctgatacggtttgggtggctaagaatctgagactagatagaccacggacctagggtaaaacaaaatactactgttctgctaaaggaatgtagcaaaaaatgagcccctctaacaacattctgctgtactcacagataaatgtctctcttggccattggcagagaatctttctcctgccatagatgggaacaaatagagagacccacaagtggtcaatatgcagagtgaggactctgggacctcagacctccgtggaggtctctatcaaatgcctcctctcagggcttaggaactctctggaataagaggaagagagattgtaagagccacaggggatggaagacaccaaagaaacaaggccttctagacatggaggaaggagtgccactcataggaacgcagagagactggcggcaggcacagagcctgcactgatctgaaccctgtgtgaggtcccagggctgagaggggacgtggatgcaaatcccaccctcaacccagaagacatctccaattcataactcctcacaaaggagaaatgatttttctccaacataatctcactgggtatacaaaccacacttaatgataggccccgtacccaatagttgatggtcatcataaaatgtgtggtatttttggggttggttttgtttcataatgctctgtctgggccctgttttgtttttgttttgttttgtttggtgtttttttttgttttttatttttgtttttattttaaaccttacaggtcttttacttatatgttatggtttctgatttttgtttttatggattttctgtgtgtttgccaatgtatgtatctctgtatctctgtgtgtttcttatctatctatctatctatctatctatctatctatctacctacctatttatttgagacagggtttctctgtgtagccctggctgtcttggaactcaccctgtagaccaggctggccttgaactcagagatctgcctgcctctccctcccgagtgctgggattaaaggcgtgtgctgtctattttatgttaattaactcattagttaattattattgcttgtttgttttctaatacaagagaaagcaaggtgtggatgtgggtgggcgggtagggtctgggagtagttgctggaggggaaactgtaatgggaatatattgtatggaaaagtatattttcaaaagcaaaaattaatgaagttgaaaaaaaaaaatcaggctgtaagcaagcattttcttaattagtgattgatgtgggagggccagtctatgcaggggctctaagagagaaggctgagcatgccatgaggagcaagctagtaggagcaagcagcacccctccatggcctctgcgtcagctcctgcctccccgctcctgccctgcttgagtttctcccttggctttccctaacagactgtgattcgggatatataagccaaagaacttctctcctacctgagcggctcttctcttgctgttctttcagacagagaggaaactgcagaggacctgggaggtcgtagctggaagcttcctttctagaataaccttcctttttgcgcatgcagtgcccctctctggggtgccccttctgtatcggagcagctgaacaacggatgctgttggcgttttggttttggcggtggtgtcctgggttttgctgacggtgggggcttgtttggccttgatagtctgagggactttcttccatcctaagtaatgattgccgtggctgtcaagcaaatacgcaaagaggacctgagcttcgtcacgctgcctggtacttgtgccttggcttacagatgagactggacagtgatgatccctagagacccaaggaactctcaccggggcttggagcttgccacataggccacgttggctggtcagtgagatctggggctcttcactcacttgacctccccagtgctgggattgcaagtgtccgccaggacataggcatttgtatgcagggattgagtttgggtcctggcactaacgcagcaaagcgctttgccacagagccagctccgaaaggtagtagtctttggtgaatccttttggaaagaacttgtccccaccacctgtctacattgagcgtgagcaggggttacaccccagagacaaccgagccctgtgccactgtgaacgaaactaagatgccctgatgccaactgccctgcttgtgggcagtgttgggcttcagtgccacgccttactctgcaatgtggctttgggaggaaggagacagtctgtttagaggggagagtccaacccccccccaatttatctagacagtaaaccaagcaggaaaaggacctacatgtacccttgattcccaaggtttgtccctgaatatatcagtatgtgggtttcagacacagacaggcagtgactctgagctgtgcggctcttcacccacgcaatgtgattctgtttcggcctccccgacacccctgacttctctccctccgttcttcctttccttttcttcccttcctctcctgagtctttctctacagttcatggtggccctaaagctgtagagcaagcatcttctgcttctgtcccactttgatgctgggattacaggcatgtgccaccacacataccttctgggacttcagttttcttattggtattgacagcagagcatatttgtccccagggtatcatggggctgactttgtgaatgtttgtaacagggccgatggagggttcttcatagggtgtctctcagcctctcagataggtggctgaaacactaggtcactagcaggtaccagtgtgtgtcatatgtccgcctcctgctcctctgtggccaaatccagggtcctgccagagctggcctaggatgtgaggctgtgcgctgacgggcagcctggctccttgcctcctcccttccacaggccaggggaacccgggctgttctgggtttacaggagtggtgtgcgcaggctgtggctggttctgcagacagctccaggtggggtcaatttagtgcatatctctgcagcagcaagagggactggggagctgcagcttgcacttctaagtggagttggtggtcatgggtgggcagacatttttggggtgtgtgtgtgaagtgctggtgtgaaggagtctgtgctgagaaagaagaacatgggaacttaagtaatctgtagaaaagaaagtagcaacattggcttagcagaaggaggggctagccagcactccacctccctaaggggaggaggaggagggaggagnnnnnnnnnnnnnnnnnnnnnnnnnnnnnnnnnnnnnnnnnnnnnnnnnnnnnnnnnnnnnnnnnnnnnnnnnnnnnnnnnnnnnnnnnnnnnnnnnnnnnnnnnnnnnnaggaggagggagaggaggaggagaaggtggggagactcggtcaggaactgaggtctctctggtttctgcagcatctgcagactggcttgctgcaagcctcaccgagccaggagagtcatccagactgactgtgtggggaagggtcgtgtctctgagatacaagaagtaccaggcctggtatcttgagggtttactgtggaaatagacctcagagtggtccctctcctcggctttatcattcccaagtgaaacaaaccaaacccaccccaaaggatcctgctgtagagacgattcgagaatgcacccatgaatgcatttaaaactataactgggcgagaacacacccttggttctccacctgggagaaatgtaatcagatgcccaaaccaaacccctcttgttcgtttgttggtttcctttcaaaatgtaagatctagatgtgcttttacagatctagaaaatgctaccttttatcatatactccagatacgccccttttcattttctggctatttggttgcataattatgaattagtttacatattgaatatgagatggaaggcaatgtagcatatgctctatgctggagagcagagcttagccaggcccgaggacactgggttctctccccctggcctgctgtcccagctgttcaggaggatcataggttcaaggcctgcctgggctacggagcgagctctaagctgggacaaggatctttaatccttgcacttgggagatggaggcaggaggatctgatcagctacacaggaagttcttgaggcagcctgggctacccaagacccttcttcccttcctctcaaagtaaaacaaaacaagaaagacaaaagacaccgtaaatgcaaggtcagcctgggcagccatagcaaggttgtctcaaaaaaaaaaaaaaaaaaaaaaaaagtgtgtgtttgggcagaatcacagcttgggctggcaagatggctcagtggataaagggactgttgtcaaatgtgacaacatgaggtatggtgggatgagagaaccagtttccccaggctgctctctgctctctacttgtataccatggcatacctgtatgccacaggcatgcacacaaaataaataatatgaatgggaggagtggctgagcacctgcctagcacccttgagattctagagctaatcggtgcgtaggaagaaaaggaaagtggttcgagacctgactggctgcctttcttggctcctcggtttaagagattctgtcattgggcttgttgttcccatctgtaaaatgggatgttttgatgcccacccgtgtgatgtcagggggattagaggagtgagatattagggaagttagatatgtcccacccacttcatgagctagtgcttgataagaagatactattgaggtctcagcaataagtctgtaaagtccgctcccaggagaagctttaaaccctggaacctttgaatgtcttgccctacctggtgaaaggctcttcgtagaggggattatgggatggattttgagatgtgatcctggagctaggactgatgtagtcacaagggttcgtagaggtgtgagggtcaaagtgtgagagggagacgtagatggtattttgttggctttgaggaaaggggtcacacgccaaggaatgcaggctgtttctaaacactagaggcaccgtgggaactaatttctgagccttcacaaagaaccggtcctgctcagagctgtgagattaaaaacttgagttgtagggccgggcgtggtggcgcacgcctttagtcccaacacttgggaggcagaggcaggtgaatttctgagttcgaggccagcctggtctacagagtgagttccaggacagccagggctacacagagaaaccctgtctcgaaaaacaaacaacaacaaaaaaaaacaaacaaacaaaaaaaacaaaaaaaggaaaaaacaacttgaggtgtcttcacctgctcgttacagcagaatggaagctcctgtgttctcttgaccagtgtggataagttggactgctggctttgagcctttcctattcttatgaagtcaaataaaagtacagctaggtctttcttgcacatatcctctaaaaagccgtatggtgattcagtagtgaccatctgcatagtagtgtaatccgagcccttgggaagcagaggcaggaagatcaaggcaagtttaaggccagcttagtctacatagtcccaggtcagccagtgctacatagtaacatcccgtctcatccaaaggaaactttaatagacaacaaacacgtattttgtctatgaaaaacaaaacaaaacaaaaacaaaaacaaaaaaccctgtaatatgtagccctcaaacaatttgcattttgttctgtgtctggggatatttttaatgtacatattagaggctttagtagtaaatctttttatgttcgtgtgtgtgtgtgtgtgtgtgtgtgtgtgtgcgcgtgtgcatggagtcagaggaatgggtttatttatttattggacttggggggggggtgagttccttactttctttttttttaagatttatttatttattatatgtaagtacactgtagctgtcttcagacaccccaaaagaggtcatcagatctcgttacggatggttgtgagctaccatgtggttgctgggatttgaactcaggaccttccgaagaacagtcagtgcacttaaccactgagccatttcctcagcaactccccccacccagttactttctactgtgtttcttgaggcagagtctctcactgaacctggctgattcagtgaggctggctgcctgtgagcagcagggctcctccagtctccctgtccctggcagaggccgttcaccaacccaaccccaccccaccccaccccacccttatctgatgataactgaattcagatccttcagatgattccgtggcaagaactctatttgctgaggcctctcccagctccctgacactttaaacataattctctcgactaatgcatttgctagacctggctttccagtttttggtagtttgaatctgccctacatcagtcttcctcccatgttgtttgaaattagtcccgtgtttaaggtttgtttcttcaacgggtgtctgctttttgggtttttatgttatcccatgttttcctatatcaaatattgtttctgggaacttttttttttttttaatagctaaacttaggcaaattctctgtggttttcactggatagatttctaaacacagctgtgtggtgggcttggatgatgtggtcagttttcctaaggagactctagcttctgtcccgctcccgccccatcatccactctcaccaggatgcaggcttcagcctttagaggcctgcagtggagcagcagaaactgtgcttgctgcagtcaggtgtggcaaggctttcttcccgcctgcgggctgtttgttctggcccaggcccgccaagccaaacctcaggactgagcaggctgcttttggctggagggctgcggaggctgcctcagcaccagctagatggaatggaggatgggggaactttggagccttttcctgtgtggctgaggcggccagcccagcctttctttcactccacatgtcaggtctgggaagtagtatgcttttccagtctcctcagggcgagaggtctggtttgagggaaatcaggaagtcccgggtgggggtaggcatgaagatccaagtgcagccctcagcatctaagtgaaacagttgggtggtttggcacgatgtttgctatccatgcgctggggaggggagcagagatggattcctgggacttgctgatcagcatcctttccaagcatgtaggcaatcccactccatcccgctccccgccaggcatctccccttgggaacttcatcaggtaagctccaggggagagaaacgaggtgtgtagttcctgaagaacagcacctgagttctggctttggcatgactatgtacatgtatgtacatatgtgaacatacgtgatggttagttttatgtgattcttttttattacatctttatttgttttgtgtgtgtgtgtgtgtgtgtgtgtgtgtgtgtggtgtgtgtgtatatgcaaatctgccatggcaagtgtgaaaaggtcagagggtgacttgggggaatttgttttctccccctctctgggatcgaactcgggtcctcaggcttggtggcaggcagctttacctgctgagccacatcactggcctgtggggggagtttttgttgttaacccaatgagggttggtctgggaaggaaagggcttctctgaaggtgggccacaccccagcactgaaagggaaggtgtgatggagcgagctgacagtgcaactgtctgtctgcagctcctgccactcaggtcctcctctcacagagcgactgtggccgggatctgtgagcgaatagaaactccccctcaacaaaactgaaacttagacagtatgcaaagatgctgtacacatagagtaaggcctgaacgactttctgacgggggtggggtaggtaggtgggtgggggggaggggatgtggttccaaagacagggccatgcagagttgccaaggagagctgacgggagtgnnnnnnnnnnnnnnnnnnnnnnnnnnnnnnnnnnnnnnnnnnnnnnnnnnnnnnnnnnnnnnnnnnnnnnnnnnnnnnnnnnnnnnnnnnnnnnnnnnnnnnnnnnnnnnnnnnnnnnnnnnnnnnnnnnnnnnnnnnnnnnnnnnnnnnnnnnnnnnnnnnnnnnnnnnnnnnnnnnnnnnnnnnnnnnnnnnnnnnnnnnnnnnnnnnnnnnnnnnnnnnnnnnnnnnnnnnnnnnnnnnnnnnnnnnnnnnnnnnnnnnnnnnnnnnnnnnnnnnnnnnnnnnnnnnnnnnnnnnnnnnnnnnnnnnnnnnnnnnnnnnnnnnnnnnnnnnnnnnnnnnnnnnnnnnnnnnnnnnnnnnnnnnnnnnnnnnnnnnnnnnnnnnnnnnnnnnnnnnnnnnnnnnnnnnnnnnnnnnnnnnnnnnnnnnnnnnnnnnnnnnnnnnnnnnnnnnnnntgtgtatgtgtaggtgtgtgtatgtgtaggtgtgtgtgtgtaggtgtgtatgtaggtgtgtgtgtgtgtttatgtgtgtatatagatatgtgtatatgtaggggtatgtgtgtgtgtgtgtgtgtgtaggtgtgtatatgtgggtgtgtgcatgtgtaggtgctaaggtgtgcatgtggaaatctgagaacaaattaggaaagttatttttctcttctcattttcacgtaggtcctggggatcaaacttaggtgtgcagagttagcagccgctgaatttatatgatgaatttatatgatgaatttatatgatgaatttatatgatgaatttatatgatcttgctggctctactttactgttgctagagaaatttatagattgctattgatcccctttcttacatatatacaatgcattttggtcataactaccccattacccctcttactccctccagacctccccccccaacttcctgttctctccttttcctcattttcattgcctcactgagatttggttcccatgccacggaattcactcagccgagtgtacagttcaggtagtgaatcacactttgtttgtggggtgtttttttttgttttgttttttgtttttaagacagggtttctctgtgtagccctggctaccctggaatcgctctgtagaccaggctgagtcctgcaaacacaatcatagctaattttagaacattttgaatcctttctcctttggagtcccttagctctggtgtcatttctccttcccagtgttggtgacaagtgtctctaacgtgtctgcccactggacatttcgtataaggaaatcatccagcatgtgaccttttttgtttgtttgttttgttttgttttgttttgttttgttttgttttccgagacagggtttctctgtatagccctggctgtcctggaactcactctgtagaccaggctggccttgaactcagaaatccgcctgcctttgcctcccaagtgctggggttaaaggcatgtgcctccactgtcggtgcatgtgatcttttgccccctcctacttccttgacagcacttgctactaaattactttcgactgtagctgtcctaggaggggtgatgctgtgtcccactgtggttctgattcgcattttgctggttgttggttgttctcttgtaaatagaatttgttctagtagccaggcttggccgtgaggccggccttttgtcatccctgctacacagaagcctgaggtgggaggctcacaagggtcaggctcatctgggctagggagttctaactagtaagttcaaggctaggctggacatcttagaaagatcctatttcaaatactgtaagcgctgggcaggttcagtgagagaccttgcctctaagatagatagatagatagatagatagtaggagctactgaggaacacatcctagggtgagtgtctgggtatcaggtctccacaggcgtctgaatggacaagcaccttctacctcccagccccacccccactaaacatagatgacatacccttacacagatacattttaaaatgggctggggatatagctcagtgatagagtggcagatactaagccatggggtcaggcttcagtccctaccacctcaaataacttattatatgatatttttgtttttgttgttattttgtttttgttttgttttgttgtgatagggtttctctgtgtaacagagccctggttgtcctgggctcacttagtagaccaggctggccccaaactcacagagatccacctgcctctgcctctgtctcctgagtgctgggattaaaggcgtgtgctaccatgcccagctattatacaagttttgttttgttttgttttgtttttttggtgtttttgagacagcgtttctctgtgtagtcctggctgtcctggaactcactttgtagaccaggctggcctcgaactcagaaatccacctgcctctgcctcccgagtgctgggattaaaggtgtgcgccaccacgcccggcttacacaagttttaaaatcaacaggctttctggctaaaccagtgcttatggcaggggaattgtctttttattttcatctttttgagctccagggcggccatctttcgcagatgtggtgctcatgacagatttgatgagaatattctggaagtctgagcacagagcacatggacgtgagcagggaacagtgaagcatgagttctgggctggggagatgcctccctgggtaaagtgcttgctgcacacaagtgaggacctgagttcagatcgccagaactcactgggcacagtagcctgtaatcgatcacagtgttttgggcatgagatgggagatgaagaccagaagctcacaggctagccctgctagctttggagtacagctgagaacaagagactcttagagatggaaggccaggatggatgccagaggttgtcctctgacctctgtacgtggtcggtggtgcagatagagagaaggagaggatgtgagtccctgctggagtctagagaaattccctacgtctcttgtttcttttgtttgttgctgggaagtaagctcagaaccttatatatgctgggcaagggctctgcttcagagctataagaagtccttgccttatatctgatcttttaggggacaaaagaacccccccccacgtgtgtgtgtgtgtgtgtgtgtgtgtgtgtgtgtgtgtgttatagactctcctcctgccacggtatctgtgttttgtgaccctatatactgcatatctgtatgaccaaagatgtctacctactacttcctaaatgtcccacacccccaagttcctttgcctgccatttgatcagtgtctcaagaaaatggcagaaagggtgtgtcctgggtgctgggacatgggtgctcttaagaagttgatggagcagctgtcacgggtcagcttccctctgtgcacctgtaaccatgtgatgtgtatggatattcctgagtaatgtgcaggtatcacccccagcctgtgactctcttacccattttactgatccataaagtgatcttgagggacccaacaaactcaccaggctgtctggggaactacagcagacagttgtccctagtcaccttgtgtcccaaacctttagattaagagatagaaaaagacaaactccaggctgggaaagaatgttgacaaaacacagtgacaaaggacctgtatccaaaacaaggagttttaaaacccaacagaggacaggcaacccaattaaaagtgggccaaagacctgacctcccttcctgctcccatccacctccctgccttccatcctgttgaagccgcacgaagctgcttctgggccagcgaggctcagatgaccccagagtaggtcatgtatgtagtttaaacactgctagttaacacattaaaaaaaagattagaagtagtaaatgaaactaaatatgttatatttaatttagtataacgaaggtgttattttaacatatgtactataattcatgaaacattaaattaaaagtattattttatacatacgagtgtttttcttatgtgtctatatgggcaccatgtgtgtgcctcctgcctgcagaggtcagaagagggcatcagctaccccgtgactgtagttacagatggttatgaaccgttaacgtaagtgctgggaatcgaaccagggactctgcgagagcaacaggtgctactaaccattgaaccatctctctagccctgagacagttaaccttttttttttttttaagatttatttattttatacatatgactgttttgtctgtatgtgtgtctgtgtaccacatgcatgcctggtgcccacggaggtcagaagatccttggaactggagttacggatggttgtgatctacaatttgcattctgcaaaccaaaccctgatcctatgcaagagtagcaagtgatcttaaccacggagccatccctcctgtcccattaacattttacattattgttttgggtgtctaactcttccactgattatgtttgttcggtttttgtttttgtttttgagtcaggggtctaatttagtaactcatgatggcctacaactcggtattcttcttagtgctgggattacaggcatgtgtaatcacacctattgtgtgtgtgtacaggtgtgtatgtatgggtttgtgtgagtgcatgtacaggtgtgtgtgtgtgtgtgtgtgtgtgtgtacaggtgtgtatgtacaggtttgtgtgagtgcatgtacaggtgtgtgtgtgtgtgtgtgcatgtacgtatatgtgtgtgtgtgtgtacaggtgtgtatgtacaggtttgtgtgagtgcatgtacaggtgtgtgtgtgtgtgtgtgtttgtgtgtacaggcgtgtacaggtgtgtatgtacaggtttgtgtgagtgtatgtacaggtgtgtgtgtgtgtgtgtgtgtgtgtgtgtgtatgtgcatgtacgtatatgtgtgtaggaatctatgttgatgcaagcaagccttagtgtgtgtttggaggtcagaggataacctaaagggatcaattctttgctcccgtcagtgggttctggagatcaacccaggatgtcaggtttgactccaagtatcttttacccactgagccatgtcaccagccccagttttactgtttaactggcccctcagcgcacagtgccttcttctgttgtcccttctttcttcttcttttatatatatatatatatatatatatatatatatatatatatatatatatatatgatattttctttatttgcatttcaaatgttaatcccctttcctggtttccctccctccggaaaccccctatcacatcctccctccccctgcttctatgagggtgttcctccacctacccacctactctcacctccccaccctcaattcccctacactggggcatctatagagccttcataggaccaagcaccacccctcccactaatgcatgacaaggctgtcctctgttacatatgcagctggagccatgtgtactcctttgttgatgtcttaatccctgggagttcttggggggcgggtctggttggttgatattgttgttcttcttatggggttgcaaacccctttaattccttcggtcctttctctaattcctctattggggaccctgtgctcagtccaatgattggctgcgaacatctgcctctgtatttgtaaggctctggcagggcctctcaggagacagctgtatcaggctcctttcagcatgcacttcttggcatccacaataatttctttgcttctttacatcacacacttatccattgactagccatcacttcaccaccaaggagctaggaactgttgagttgaacacatggtataggtatagtgcgccttacccttccttcgttggtgacaagcaagcagacaccgtgagttcaccatagtgaaaatgaaggtgattgctgctgctttagggggaccctgggaagtttcatacctttcgcaggaaagtgtcagcaaaatggtggcacagcgatacctacctgatgtgccagtaggaacaccagagacctggggtatgaaccattgggctcagcactctgtctgagtatttccattgtcaggaccatccttagaggatagttttgcttctttgggatccagggcaaggtgagtgttcatgttggtcaccctggagaagagagaatatgatcttgggtctaagaacaaactggagatggtatcaattttcttgtgcagcatagtaaaacccatcaaataacaggctcagaacaaccccttggtgggcgaagatttcaggagggatcaatgggcaggtgtgcctgtgtttcaactgatgttggctgaaagccctcacccagacatagtctgctgaaggctggggtggaagatatgtgacagtagaagctgtgggtcattctgccatgtcctctcatgaactagacagggctgccatgtcctctcagtcaaaccaatcacaggggtggttctcatggtggagactgtggtcactgggagcagctcaccaggccttgactttggtgttttgggactgtctagaagacagtgctaaggaccttcatgatgggagagagtgtctggtggggatctgggagcccggtgccaatcagtagtggtagctggcgtgtcttgtcctttatgtggcctctccctctgcagcagtccagtgggctttcttgaatggtaggctcaaggatcggtgttcctaggaggtagacagagggcctcaaggtttcttgaggtctgggctctgagttacagtatcacttttgtcctctaatggcgaaagtgggtagcagagctgaggagttctggtggcgtcggtaaggcggtagcagcctagccttgtgttccggtggctcctggtggcctccttgtccactgctgacctgggaggtgctgtctacccgcatctcgtggggctttgaagtggtcttggatcctgggtcaggtttttgggggttttttgttgttgttgttgctaatgacagcctcagtaaacaatcagctcagagaagtttccaggcctcacctggccttcaagacactgatatatgtggacaatcagagaaggtgccatgaatcttttctcattacttttactttattttactttgttttatttatttattttttttgagacagggtttctctgtgtagccctggctgtcctggaactcactctgtagaccaggctgtcctcgaactcagaaatctgcctgcctctgcctctcaagtgctgggattaaaggcatgcaccaccactacctggctttattttattttttaaagttttcatataatatagtttgagcatattccccctccccctattccttctagatcctccttacttcctacccaccccgactcttatgttctttctctccctctttgaaacaaatacagaatgcttttttaaaaaaattaattacttttttttaatatgcgatgtgcacatttgtatgaatggctgtgtgtgcctgtgtcacagcaggcgggagggcacttgatgccctttcccgtgattcaccttcactgttgctgtctgccttagtctcactgagccaagagcttgtggtttgttgactaaactgctggccggtgggtcgcagccatctttctgtttttgtccattaccctgtccgtcttctagttctaaggttataaagtgcggccaagcctggcttcttatgtctactctggggatctgaacacaagtcttcacgccctttgagccgtctccccagccttcttgttttgagacaggatccgagttatcccaggcaggctttgaaagcgttaactcagctaaggagccgattctcctgcctcttcctccctagtgctggggttacaggcatgcactaccatgcggtgctgaggatcatcaaatccagggtcttgtgcatgctaggccagccctctaccaactgaaccatatgtgtttcatatgtttattgagaatacaccctgtgtctgaccagggcaggtaagccttgttggaccgttggtcttgtgaccctgtgttcttggcagacatgggggcttgcatgaggcctagaagctgagaggaaatggaagtcccatgttgggagggagggagggagggagggnnnnnnnnnnnnnnnnnnnnnnnngagggagggaggggagaaaagaagacctggctgtcatctcctttctggtccttcctctcatgggacctaggctccagcacttcctctctgtggctggcatgcctggcctgctctttgagggttgcaacatctgcttctcagggctgttgtgaggatggaggagtgtccgtgctctcagcgattaccacagccctctgagcctcagggcttctcatcagggaggccctttctgcctgagagggcccaaggctcagttactctgtacttcagtctcctgcctgccccactgtttgtctctttccttctctttgggatttggtcatcccataattacacatttgtatgggcagatgtttccctcctccagtcggctcttggaagggtgatttgttgcttctgctgttctaaaacctcacatgaccagcgcattccaggcacatgatatgcactgagcaggtggaggctgtatccctccctgcccctgctcccctggcctcggggacacctatctgccgacgtgacgtggtgctctatgtgttcagcaagggttatgtttccagaagcctctgcgggcctgaggagagccaggccagagccaactagccaggaacacccttccttagatgtgggaggcttggccggcgctgtgggtagaggaaatgtttagaatgggttgtgtgaggatggccccttgccttgagtttccaaggaaactctgggctgcccaaaccatctctctggctcaggggagcactgacaagaagaggagcgttatgggagtgagtgtttaagtggctttttgctggtgaaacacttaattctttttttttccttcccattttcatatatatgtgtgttgtatgtgagtatgtgtgagtccacacgtgtgtaggcatgtgcacatgtgtgtgtaagttcatgcaggggtccagagttggtgctgagaattgctctcagctataggctagctaacgggagtgaggctgccttcccccttgctggggagcaccccaggatctgaagacacactcatgaaggagtttgggaacaccaccattcccgcctataaaacggggcacaatgtgaaccccactttatcagattgctgtggggacggagtaagttaagatctgagggaccagattgtgcacagccctggtgcacatgctaactgtgtggcagctggcgacagtggcataatggtttttaatctatggccgtgcagtaaaccaccccaaactgtaatggaggctgtagagaaaccaggcctttaaggtaaccagtaagggctgcgagcagggcaatgacacactcagctccttgctgccaggggatcgaggcagcctgactactgtcatattgcatggcccacacattatcagagcctcgctcctccaccctgccacatagccccattcctctactttgatcacgcagcacatattaactaagcctgcttcctgtgatgtaaggtctccccttcactcaggggagaccttgaaaagcaggcacccaggcagaaattctcctctagaggcctccttatggactcttgtagacacccggaaatctcttgcccgagagatggtttgattcagcatctcttgctctcaaactccctcccttcttctgccctaaaaccagacaggaggatgtgcgaacgagcatcatgttggagctgccaacctggagttttgcagccttcggggatggctctgtggcttcctctgggtcccgggttctgggcagtcactgcctgttctgggatggctggagtttgttttcagatgggccctgatgttctaatgggcttggtgaggctttgctagctgttatacaccctgcctgtgctgggctggccctccagactttcatttgagccccaggaagtggctgtgtagagaaaagcacagaggagggtgggggagctatgggtcactggtgcgcaaaaccccaaaatagatcatcttctaagtcgccaagcccgggggggcggggagggggcagccgcagatgctttacataatctcctacccagaaggaaagggtttttcttttcttttttttttttttgttttttgtttatttgtttgtttgttttgtttttttgaacaaaagaatccccaaggaacttgaaaaatatcccggtgtttggttcagagcatcacaaaatgagagccagagaggctcaggttcaaatccccaacctaccatttgcaagccgtgtgacttggtctgagccacaatgatgaagaagatgagagcagaccttccagtatgtatgaagcgcagcttacgttgtatttgatacatggtggataggctgtgtggagtttccctgtctctcttccattttcttttctcctctcctcttggtcctggacttgtacttggttcctggtagcttcatcattgcggctggcagggaggagatgggacaaatatctcctctcttgcaggccactggcctgggagggaaggttgcaggcatgaatagtcacttctgtaacctcctcccccagacccccaaaacctgtgagcctgagatgctccttggctcaggctgtgcgtacaggcaagtgaggctcactgagcggggagaggctcctgagctatgaaggtagatccagtgtgctcaagaggcctggtgacaagcagatcaggtgagccatggcatagggacaggaagagagggtggagtgggtacagaatgggactgtgtatcaaggaatctgggctaggtttgtagctcagcacagtgcttgtcttacacatataaagaaaagaaggaccagactatgggtctcctgagcctcagggagtagccaggctccgagcgcccctgatttcagcccaacaagaagccatagggtatgtgggactttgtggtagtgtggagaggcagagacagggtgctgaggttgttcagtgcttgctaggtaactcaattgctggtcaaatcttggtatttctgcaccatacccccccgacttgaacagtctattctctgaggcccaagtgtctggtgttctgaagctaatcctgtaggcaggcttgtatggccacgtagcagagtcctgtggttaagctagcacctgctgcagaactgtttctttgagctggtggcaggctctatattagccaggttctacattgttctgtctgccaccagctgccttacccagccggggtcagggtcagggtgagctgagggtaggggtgtggagagggtgctcttggggtaatgtctcgttttttttttttcccctctgtggtatgagcttcaagttgtaaagttcttgccgagtgtggtgacaaatgtaatcccaacacccagggactttgaggccagcatgggccccaggttagtctgggctacagaagaagacctagttttaaaaagaagggttggggctggggaggagatggctcagtaggcaaggtgctcacattggaagtgtcaggactgggatttagatcgatagcactttcatacatgctgagcagcggatgagtgtggtggtctgcctgtaattcctgggctcagaggtggagagaggtcctcaatgcaagctgctggctagactagctgtccttgcaagctctgtgttcaactgaaagatcctgcctcagtgaataaggtgtggagtgacagaggaaaatgcctaacatctggcgtcctnnnnnnnnnnnnnnnnnnnnacacacacacacacacacacacacacacacacacacacacactatacatatatgcaaaagaacaggagggaaggtctggggatctcagtgggtgaagtgtttgttatccaagcatgagaacctgagctcagatcccaacacccacataaaaaagcccgccacggtgtcacaggtctataagcacagtactgagggattagagacagaaggattctcggggtgtgctggtgagccaggctatctgaatgagtgagctccaggttcaataagagagcttatctcagaaactgatgtggggagtggcagataaaaccagtgaaagtgagcctttggctgcttcacacttatgtgtaagcaggttcttgtgcacacacaggcatatactacatatacttagacatattagcatacaagatacatatacatatatatatatcacacacacacacatatataaatcaaactagaaaagctgttatttctgctttcttgggggtgggagcctttgaaagtccatcaacttctgcagaagaggcaatcctaggcttggtaggacacttcaggcctggctctttgctgtgactgcatttggctgggtcatgaccctcttgtatgtgtcttacatgccatacattaggtactagaattaaagagtaaagccacagctgaggggacatcccacgtcgggggcatcccatttattgccacctggtgtcctttactctccttgtcctttctcatgacaccaccttcattggtgaacaccgactcccaagggtcatgcatttgggattaaggaggatgtcctgagctggggcgagatggacctggatgaagaaaagaaattcaaagatgttggctctgaacatggcaaaagtagccatgggacaaagaaggagaaacactgtccttgcttcaaaagacatcagacagattacagtgtttgaatccctctctcaagtgatcttagataaggcttatagctttgttcttgctgcttttgagcctagcctggtcttaaactcactatgtagctgaggttgaccttgaacctctgatcctcctgtctgctgggattataggtgtaagtgcctacacctggtgtgtgcagggctggggattgaacccaaggccattcgtgagtgctaggcaagcactctaccaactgagctatatagatgcagggctgccttggagaaggcttgctcatctttcaagctatgttctggggctgtggtggagctcggtggtagaacccttgcctcctgagctcatgtagggcctcccccagctctacagtgaaaaagagagcaagtctgtttccggctctgctcagccgtgtttgagatctttcgtgcctcgcctcagtttcctcttgggtatggtgggaaatcataacagcggctacgttttagggggttttaacatatgcactaccacatacggagcagttacagaatggccatctgtcccccgaggtgtcatggggcaggggctgggggacacgttgtgtcctgtccactaccaaatgtcatgcatgataggtgaaattacttgttaaccagatccttggtccttgaaaaatcccgatacttcttgatgaatctacccattttacagatgcaattgagtctcaaaaggcaggaggtgctttctgaaatcacccagtgagcagggccttggttgtggttttctaggacaactttgttgtttgtttgtttgcttgttttttgagacagggtttctctgtatagccctggctgtcctggaactcactttgtagactaggctggcctcgaactccgaaatctgcctgcctctgcctccccagtgctgggattaaaggcgtgcgccaccacgcccagcttttaggacagctcttgaggcagccagagtctacaattcaggaccactgggttttccagagaccactgtccacctcttattagagtctctttgtctcatttccctgttgagttggtgttgaaataagagaccatcctaagttggaagtgccctggtgagttcaaggccagttcagtcatgacctgtgctttaggatcttggcgtctttctataggcacagagctgttttcagaccctcaaaacaagcctttgcattgatgagccccaaggaaagaagtagatttcggctgaggggcagacaaatgacttcaaatccaagcttcaaggagggaccagctgagccatgacatgcctgctagagagtggatggatcgagcctcccagggtggctcaggctctgcaggtctgtggtgggggattgcaggctgttaatgtgaaatctcacctttaatgtgttgactcagttaaacacataaacgggcccccaccatccggatttactggacacatcagtagccacagtggctcacaagctataggctcttccaggcagctgaacactttttttttttttttttcgagacagggtttctctgtatagccctggctgtcctggaactcactttgtagatcaggttggcctcgaactcagaaatccgcctgcctctgcctcctgagtgctggggattaaaggagtgcgccaccaccgcccagaagctgagcactttcaaggctctgagcagccatgtgagctgcctcttcttcctcttcttgtagcagccacagtgttgatctgtgtggtcttgtttggtggtggcgtcgtcgtcgtcatcctaggaagacatctaaagttaaaaaactcactttcctttcacggacgcttttcataccagcctcacagagtgcagctgtgatgtttgaacatgatggcagctgcagagagcctgctgagctttctgctcagttaagtgagaaactccttcctcacagtctgtgttctgctcttgccacgaactgctaaagttcagaaagctaacggggcggggcgcagaaagaacggagagatgacagagctctggtgcacatcactagagtcctgcttgtagggtgacattgagtgccatgtaggcatcctgacacctatcccactgttggggctcttatgtatttgttttgcttgggcagatttgactttgggcaagagatgtcctttggcaggcatagagggaacagaagataatagcttgtgcattctagcaagtgtcaaggtcctgtgaccagagagtggctctgctaaaaccaaaccaaaccagtaagggtagagtagacagaagggacagtggctggggagatgggaatatatgtccacagaagggaaaagctatgttgatcttccttgccatcccacgccttcaaaaatagttgactcaaccgatttaagtattcaatataatgattaattataggcagagccataatagggccatcagtacagtctaggttaggacctggccagcttccagaaggctccatggctgtctgtcgttcttgactatccattctctccttagctgcttcccatcttctcctccccccccccccgcccctttttgagatagggtcccctcacataccctacagtgactttgaacttgctgcacagccaaggatcatcaccgtgaacttctgatccttctgtctctgccagtgctgggctgacaggtgtggcccaccacaccagttttatgatggcaggggatggaactgtgctagtgctccactgatggagtgtccactccagctgctcctcgctctctgattattggagcacacaggggttttgccttggcttatatgcgcgtgggggacatttttaccagtactgccgatgtgtccttgttggtggctggatgatgtcccgtggtgggtaggacctggcagtcttttgggtcttccatcactgtgacttttgcttattcagtctctgccaacagtggaaccaagggtctccggctttgccctgttactgtaagatacccacctgcttctgcccacactcagcatcagggggagagatggtctttctccaaaccctacaggtaggacgtagttactgtttagagcagggttgaaaaaaaatttcccaaaaaggtttatacacacatacttaaacgtaagggtttcttttcttttcttttcttttcttttcttttcttttcgtgcggtgttatttatatttaaaattattgttattgttgttttgggtggttttatttatttatatttaaaatgattatttttgttggtggtgtatatgtgtgcatgtgcacgggggcatgtgtgcatgtaggtgtgtgtgtgtgagagagagagagagagagagagagagagagagagagagagagagcacgcgtgcgcgagagagagattggtatgtttagtgtttagttcaggtccttccctttacttgagttcctgggtactacagttaccctggctgtattttccctcaccaggcctgctgactttggcagggatcatggggtgaatctctactgcaaacagtgtcctgtaaacacgtgtgaaccgaggcatagcaaggaagcctttaatcatgagaagggtgtctaggtctgggcttcagtcttgagaaggggtgcctgggtctgcttactgcccttgccccgtcctcagcttctgccgcttccattccattataggggtgacacgtattttattttcatcttattttattttattttattttattttattttattttattttattttttgagacggggtttcctttgcagctctggctgtcaaggaactcactctatacatctgcctgcctctgcttatagaatgttgggattaaaggcacgagtcaccattgcctggctctttaattaataactgtttatgaaaaaaattaaatgtaaataccaacacatagtaacactgtaaacagtaccatgcatctacctagcttgttcatttgttgtcacatatatatttaagatctgcctccctgtttattttgtttgcttgtttgtttctttgttttttatgtgccaggatcaaacccaaggtcctgtacatagttgatacagcagtaaagaaatactcaacaaagaagatctcggtatggtgtggtagctcatatatgtcctagctcttgagaggctgaggcaggaggaccactctgagtttgggttcagcctgggctacatagtcagaacttgtcttataaagcaagcaagcaaacaaacagaaattagaacagagacaaacatattgatctcagctacattgcagccctcctctggcttttatgcctctctccatttatgttcttttgctccaggctccagctgggtgcttacaatatctaggtgctcagaactcaggtctgcttctctccgatgcacttggcagtggggccagatcctggtttgtgttgagcccttcgctttccaggaggtgccgtgggcaagcatgtcatttaccaaggttgtaggccagcacagggtcctggaggtgaggctgtgtatgtctagtcccaccaacacgtgcccaatcaaggtggatgtggtggtctgaatgagactggcccccataggctcatatatttgaatatttggtttcccattggtggaactgtttaggaaggattaggaggtgtggccttattggaggggccatgtcactggccagggctaggggaggcttttgggtttcaaaagatgtctgcaattgacagtcttctccctctgctttgtggggttgtggatcaagatgtgagctctcagctattcctctgtcccactagcatagactctgtttgaaactggaacccaaactgaacatcttcttttataagttgccttggtcacagggtttagtcaggggcttggtctgctttcccaccgagtccttacatggcatctggcatattcctgaatgtcctggttgcaaactaaaggatacagacgaaagattgagggttagggaggaaatatcaaatatgcaattggcaagttgtcacttgctgagggtcacagaaggcaccagaggatacttgggggtggggtgggggggcgctaacagatcatagtgaaaaggcctgaaagggggaagaatagattgtgggtaagagaagcaaccagtgtatgtgtgtgtggtgggggcgggggggtgtggagctggtgtgagcacgtggaccaggctgtgtggatttggtgtgagcacatgtcccaggctgtgtggagctggtgtgagcacatgctccaggactgtgtggagctggtgtgagcacttgttaaggctgtgtggagctggtgtgagcacatgtccaggctgtgtggagctggtgtgagcatgtgtccaggctgtgtggagctggtgtgagcctgtgtccaggctgtgtggaactggtgtgagcacatgtccaggctgtgtggagctcgtgtgagcagatatatgggctctgtggagctgctgtgagcccatgtccagcctggggaggacatgcacagggagagggtgtcatgaggctccagggaacagctgcagcgtgtcccagcagggatgtcattgcttcccctagaccacacctcacgcttctccatcttactgctgctctgcctggaatacttctctttatttattttagatttgtgttgtaaatgtacgtgtatatgtgtgtgcctacatgaatttctgtgcaccgtggatatgcaggctccttgagaggccagaggaaggcctgagatcacctggaggtggagttttgggtgactgtgggccccctgatgtaggagctgggaactgaacccaggcgccccccccccccccccgccacacacaccagtaactgctcttaactgctgagtcatctcaagcccctctgtgtgtgtgtgtgtgtgtgtgtgtgtgctgcagtgtaccgcacatgtgtggtgtgctcgctcatgcatgtgtgtgtagatctcagaggttgacagtacctgtctctctctctctcctacttcctttccttgttctctgagacaatctcctggaacctggagtttcctgttctggctggcccggctggccattaagccccaggagttctccattttcccttcctcccccggggctggtgtcgctgatgtctgatcctatctcatgctttgacatgggttctgagtgcaggccctcatgcttgcatggccagtgccttacccactgagctgagacctgcggctcctagggtaacctttcttagatgtcagcttccatgtcactttctgagggagacctccctgatcactcagagagcatccctcccgtcctgtcatggctcactctggttaagtcttatggtacttattgctgccaaatgttgtacttactaatttaccggagatctgtctcgtcccctgcttgatgcctgtcttccagagcaatgcccggcaggcacctgggtctgacactgtcactgaccacgagaacttttgattgacagcagcttgagtgtaggcttttgccaggtacttgttaagctcttgaatatgaacttatttctttaaaccctcaggtccccttgtgtatgtttttcttttttcaccttaccagcaggaagtggaggtcagaggggtgacaggtggtgttggtgacacagcaggctagggaccccaagctggggccctggacacggctgcggggaggggaggccagttgtagatctggccacggagcaaattaaatttctgtttccgttaatggggagctcaggctgccccatctacctgggctggaggaggttcaggacccaggctctgcttctggccccgtgctgcctttctgagagggaagcaattgctcatctccccactggctgcagcgggggaactgccaggagatgaccctgcccaccctaaggcttggtttgcaaaacgctgagcctggtggggaaatgaagggctggcctgctaaccacagcagcaaggaggactcatttgcaagagtgaggctggcccggggccctgctctgtcccctagcagagccatttctgtgggcagttgtcctgtaggaacccactgggtgcaagtccttagcttgagcttggagcggggtgaggggaggggaggggagtcatgctagagcctcagtcttctcctctgaggaatgggctggttgtgatatcatgacaggcaaagaggctggtgcttgagagccctttactaaccatgagtgcttggccaggaattcccgctattacgctgtggagctaggcggtggacatgaccagagaccctctcccagtcactatctcacgtagctgctacacttctggaaacaattcccagttccatagcagtgtatcgcctccatatctttttgaacagtttacatttatctatttgttatgtcagagtcagggtctcatacagcccaagctagcagagaccttgctgtctacttgaggatggtttcgaacttcagatctccacctcctgagtgccgggatgacaggcccgcagcaccatgccccggttcgacagtcctggggatcaaagccaggaccttgagcatgctgtgcaaacacgctatcatctgaggtacattcccaggcctaatgccacctcaattaaacttccgggagtctgatacagagctggcccaatgcctcactgtcacacgaccacgcttcctgcaaagccaaggatgaggcagagaacgggataagcgggccagaaggagtttgatggtcccttgtgtgtgcagtctggtgctgggccctgatggtcacccatgggtcatcttgagtggttacagtaaaaagggagcaagaagcaggaaagaggaagtctgggagaggaagaggagatgcacagaggtggctgtcggagcaaggctttcgtgtggggcactcgatcccgcttgggctgtcttgtggagctggtgcctctagagctttctcctccctcatcctgaaggaggtgataccaaaccaagggttgcatttagggttcagggactcagacgggctctaagggactgtgggaaaatcaagtctttaaagaacgagaggttctgaggagttgggtcagtacataaggtgcctactgtccaagtacagcgacttgagtgtaggtccccagtgcctatggaaaaagctgcctgtagaggtttgtaaccccagtgctgaaggggcagggcctattggccagccagccaagccaaactgaagagcttcaggtttggtgagtgacctctgatgtcaaccttgggccttcacatgtgtgcaaatgcacctgaacacacacatgcacacagccacactaactggttcactcaagacctacatgtgtgcacttgcacacaccccgcccacatgcacgtacatacccacactaagtagtacatacagcacatatgtgcaggtacccacactaactagtgcatcacacacacacacacacacacacacacacacacacacacacacagtaagatctgtgctccccaaggctttcaatcccagggagccactacataggccgaggcttaggtgtagggtagagtcaactagggctctggaataatctcccagagaccaccgcccccaccccctgcccacacctcatctgcaccctcttctttttgtgtggtgttgtcagcctaacgttcctgagctagtgtgacctggctgcagtttctctaaccctgtcactcaccaccccagggtgtttggagaaggccttgtgggagtttcctggaaaacaggaggagtgggaaaccagccttgctcaccttatcttctggccttacactttgagacactaattatcaccctgatagctttggcatcaaacctcaaccaggtggccctggctgcaccttctgagggtggctcttctcaggagttggtgggaagatgaagcggctggtcaggctggagctaggcctctacctcaaggaagccctgtctgttctctgtccaagtcagatgtttctagctggaacttgacattggcagtgctctgtgtctacggggctgctgatggaatggccacccatccgtgggtgtgagtgtcttggcttaggagctgagccctgctctggaccagcagggcttgggcagagcttccctgaccttttcaagccggtttccttttctgcaaaaaggaaacaatgaagagtttcacagctcagagaggcaggagggactctgtagaaaggcctgggcctgggcctgagggatgggaaccctgaataactacttctggggtctcggggctgtggtttcttgcaagagtgctcgggaggggaagtctgaggaaggcaggaaatttttcctagaggggaactcttggggaccaaggcccacctgtcctttctgagaatcttttttttccctaaagaattactatcttaaaattttatttatttatttatttatttatttatttatttatttttggtttctcgagatggggtttctctgtgtagccctggctgtcctggaactcactctgtagaccaggcaggcctcaaactcagaaatctgcctgcctctgactcccaagtgctgggattaaaggtgtgcgccaccactgctcagcactaaagaattttttattggcatatatctatcatcgccaaaaattaatgcgtaacccattatgacatgttcatacatgaatttactgctttaaaaaaaaaattcactcccattgtcttctcttgtgcccctcccactcccccagtggtcacctgctccagcctactctcaaatctttttattgtgagcgtgactagtgggtttaattagggttagttacagggctgacaagcataaacaccttaccagtggctacaccactaaagaaaatgtctcttagctgggcagtgatggctcacgcctttaattccagctgcctggagtcgggggcaggctgatctctcggtttaaggccagcctggtctataccttgagttccagggcaccaggtcaggtttcttaacaaagcctgtgaggggcgggggggtgggggtaaggaaagaaaagaatagaacagaaaaggaaaaaaaaaaagtctcaccctttctcagcaactgctgcctgcttataggtcttccgtgaggggtgtggcaatgtgagtcccgccccctccatgatggactgttgtcggggcccaatcctttgcaggtaatcacggatgtcgtacaatagccatctcatgctcgaagacagcagttcacagcactccaaaccttcctctggctctcaccttctttcgtctccacctccttgagccttggacagagtgatgtaggctctcatgtgaggctgagctcctttttctcagcacctgaccggctaagggtctctgcagtaaccgctggccatcgcacagagaaacttctttgacctaagtaggcagtgatgctaatctatgggcatgcacgtaattgtttctaaggtaatttcacatgtgtattttggaggaggctgtcctttcacacgcccccctgacagcccatggcctccctgatgatgacctgaggcgtgtgttggttgcattggttagtagctgactctgatttaagttcgatagcaaggaggaagtctttgcttggggcttggacgactcttgtgcatctttgtatcattctgctctccagagctgagatatttgaccctgtaggcacagagagaaagttgccttgctcccgctggtctgcaggatgctgcccttctcagcagaacagggtagaggaagcccggcttcacggagccaccacctcctcctcattctgggtgttggctgtatcttggactgggtgacctgggtgaccttggatcaacttctcatctgctctgaggctgagttttcacatctgcaaatgagtgtcatgactttgtcatagggttgctgagagccagagcggccccaggtaacggagtaacagctatcaatagtaaaggtatccagcgcgtcctctggaactgtcattctcttatgctggagggaaggcagctgacctggaggtgctggcaggcctgtggtcccctgaaggcctggggaagctctgctcttacctcctgctcacctcgggttgcacttggtgtgttagattccctcacatctctgcttctgtcagtagatggtcctcttccctctgtgtgggcctttgcccaaatttccctctttttctttcctttaatactggggattgaatccagggcttggcatatattgggaaagcatcctgctcccgaactacacttcagtgcttgcttcttagagatgctgtctcttgccatgtcttacaatgtatcctaggctggtttggaacgcctatgtagcccaggctgtcctggaaatgttgccctcctgctcagccctctgagtgctgagattccaggtacgtgtccagatgtgatgacatctgtcttctctcttcttacaaagatgctctgggctctggctcttcttcagtctactccagcttggccccatcttaaattggctctatcctcaaggaccctatttctaaagaagattgcatttggttggtcctggcgattgggacttacacgtatttttgggggggtggggagcagaatgcaatgcaaccgctagtattatccattcatacgtcgtctccagcatgtcgtctccaggtgacaaaggccaaggctggagccatctttactctgaacccctgttattcaggttttcacaccctggggtctgactttcagttgctgaggtggctctcactgtccacatgatgtgggtctgagattcagagagacagtacaactgcattgaagttacagagtgagggaggtgggcctggattctgggtccccagatcctagagccaactctattccaaggaaccatgtcccctgtgtgcatgtgtgcacacagcctatgaatgttcattgtcccatgtggtgtgtgtgtgtgtgtgtgtgtgtgtgtctgtctgtctgtctgtctgtctgtctgtctgtctgtataccacaggcctgtttcaacttctggagccaagacactctggatgtgagcagtagtgaccagcttcaggggagaggacttttgggtcttggcttcttctaacttcctctttttctggctagcagttaacaaagaaccctgactttggggctggggatatggctcaggggtagagtacttacctagcctatgtgaaaccctgagttcaattcctagcattgaaaaaacaaacaaacaaacaaacaaacaaacaaacaaacccagtgacataatttggagttagatcactcaggttcaaatcctggcttgactggtatggcttagggcgagtcagtaactcgctgccttagtttccccacgtgtgctgcaatgacgatactgtagccttatagatggacacaagtgactgaaaccctactgtgtggtcctgtgtgtgccagagctgacttaatgagggctccttcccctttatcccgtttggtatttttctggtaccaggaggtcctgggaaggaggataaggtgtggtgctttccaggggaggcaaagctatagaaagctctctgcacagcggtaaaagagccaggagtcagtggtctaggaacctttcctttccataaagaacacagtgcacagaaaagccatgtcctgtaaactgcacacgcatgcatatgcttgcgtaggaccactggttggctgaggtgtgtggaggggctgcctttgagattgggaccccaacttcccacttccatgatagctctgcatgcccagccttccttggtgctgatcacaactggattcccagctgatttcagaagcggtggtcttcaccaaagaacacccagtgccaggccaactctgggcctcctgcaggcacttcctctgggttccagtaccctgcttatcaggaggccgcaagagcaccatctatttctggcctgtctggaaatagtgtggtcttgaaagggtggagggcggagtcagctttaggaacagagacatcgccagtggagggaggaggactcatttgacttctgtgcgtgcatgcgtgcatgtgtaggccagaggtcaaaatcaagtgtctttctgtatcactctccaacttttttttttgagacagggtttccctgtatagccctggctgtcctggaactcattttgtagaccaggctggccttgaactcagaaatccgcctgcctctgcctcccaagtgctgggattaaaggcgtgtgccaccacgcccggcttccaacttactttcttttaaagatttatcattatattaattattttcttttaagtatttatcatgatgcatgtatgtgggtattttgtctatatgcatttaaagggcaccgtgtgtatgcaatacctttggaggccagaagtcagcatcagattcccctggaatagccctaaagtcacagatagttgtgaagcaccccgtgggtcctctgcaagagcaacgagcttttaacctcttagccacatctccagtccctgtaccttagtttttgagactgggtctcctactggatctggtgcttgctgacctggctgggctggctggcaggacctacctgtctctcctgccgggtgccagggtaatgatatatagccctgtgcctggcttttacatggtttctgggaatggaaatcaggtcctggcgactgttcagtttcgctgcacatgtagaagtttgtatgcccagggaggtactggatagtgtgtcgaaataaggtactttttgtccttagccatacatactgctgtcaccttctgaaatgctagtcttttgaaaggcccttgctgatatgagggtagcataaatggagagttatcccctgcatccctgtgactgcctcccctaacccagaccttgctctgacctctatttccattccttacacagcgactttggcttcatcctctgggcagttcgtttcttcctacgctttaaaactcagtagcaagctgacagacagttgcttctgggaagaatttaacaatctggtctcatttccaccgaagccatgactatttgatcgttcttctgctgcttgctgaatggctcttgttttctctctgtcagagttgcgaaaacatcctcagaattgatttgctacagttaaaaaaaaaaaaaggcaacttgaggaaaatattagctacatagtatcaacagcgtgcagccattgcttatcacaaagctctattgcagttggagaaagagtgttcaagccgaggtgctgaagccaaacacaacaaagaaaacaatgcccagaccaagacaaagaaactggccggtccttcaggggctggaatcgagaaatagattttgtgtactgagggcttaatgtgatggttatgataaacggtagcaaagcacattaaatattaagtgctctttatataaggtagcaaatcctttctgcattgtactaacacttatttgtatcagtgggtgtgagtgccagagaaaggggatcgggtcgggggaggaagagagagagggattgagagagagagagagagaggagaaaagctcaggttattatcccattattccttaggtcccaggtcccttgttttcttcttgagacaagggctcccactggtccaggactgaccaaatgaggctgtctggccagtgagccccggggatctgcctgtctctgcctcccctgtgctgcgtacaagcatatgccactgtagcagacattgttacgtggagtctagggattgtactcaggtccacctgattgcacagcaaccacttcgccaatggtgccacctcccagtccctgactgtgtgatttctagacatacactatacgttcagtgtgacacctagtgctcattttaaatggccaccctctctagaatcttacataggaaggatgactgatttcacaacttagaggtataagatatgtatttgtgtgtgtgtgtgtgtattaagatacattacagggagacacagcaaaaggggattattctaacttagtttccagcaggaggagaaagggccaaatataagggccactgtagcattgaacttgaaaggattacatgctggggtttttttttgtggccagagactaaagctcatcttcctccctaaacttgcaaacaattgagctgaaaaaaaaatggggggagggcaaggagggacagagtatcacgtagcccaggctggcctcaaacttaccatggatgtagccaaggatgacctggaacttctgattttcccgcctagacctcccaatgccgagattccagatggacatcattatgcccagtttatggtgagctggtactgagcacagggcctggtgcatgctaggcaggcatcctgacagccaaactacatcctcagctcagaagatacctaccacagtgtgtccagatcctgggcgcgtgggcttggtgagctgcctggagagagggtttggaactatggccttgtactttggtggcttgctcaccctgtctccagcactcttgggtgctcacaggtggcctgtagccagttcctccctcagtggcagggagccaagcagggcaggtggctgcttcggggttaatagaaccagaaaaggactaggaggctgagctgaagctgacctgaccgttccaggttcattatcagaaagtatccctgcctctcccttgacagggagtgtctggggcagaaggtgggatggttggggctttggcgacctcaaacccacccagggactaacatctctgcaggaacacaaaacatttcagcaaacagctaccactgtgtgctcatggttgccagcatactctctttccgtggaagcaggaggcatgaacgctctcttctgttggctcttagtacagtctctagaactgcggggtcactttctcaccaagacagtaagagcagtctttcccccccatccttagtgctaaggtgtgtgtgtgtgcatgagtgtgtacactcatgcattcacacatatgtactcttgcccgtggcggtcagagaacaaccttgagtgcccattgagcctcatggattcttctgtctccacctcctcagtgctgggattacatgcatcaccatactaagattttttttttaaatgtgcactctgtgggattgaacttgggccctcatgcctgcatgacaaacattttacccactgatctatatgcccagctcccaagcaaattttaatatcttaggctttgttcagaaggccagacctggctctgcattttatatccatggaacaatggcagctaaaccagaagagagtgacccaccctgggtcccccagccaggaaagagtggggcttcaagcctaggtcttctggatgcttccaagtctctaggctactcaggctgctgtgggctaggttggtctctggtcacatgcagttgcatgtcaaacagcctggcatctttagtttctttcaccacggtctctggctgagctcttggcccttgttcttgtcatataaactacaagcagcagaagggactgttaagaggtggccggaatatcatccccggtagctgacgtaactttgacagagacttcttggggctgcagtttgtttccttcggttcacagagcagtggaatagggtctctatccatgagaactgcggtggggtgacgactaggccataacggtagaaagcagagctggggtttgaacctgggtctttggactccaggatgtgctcatgggctttgctctctcttccctacctgagcccatcttcaagacctgggccagacaaacacatgtccactcagaacaggcttctcccctgtaggtaccggatcctactggcctctcattttcctgtacatatgtgtacatatctgtacatatgtgtagatttatatgtgttggtgacactgggcatgctctatatttctaggctcctagaactcctgggacagagccttgtttgtcacgtcatcttgaaatccccggtgctggctccttttggtgctgagactacatgggtgtatgaatgatgacttggcaaggaggtgggagcacgtgtgtgcacgtgtgtgcagctgtctagccttccgtctgtctttccccttgactatgtcttgaggctatatgaagatgcagtttgctggcaaacagtgccacctaaggtcaggtacagggagagagagccatgctctaggtgtgaaggataggaggacatcaccaggggacactgctggaggttgaagatcaggagagggagaagcaaggagacaggaagatttttctggaaggtttttctttcttttgttctgtttttttgaggaagggtctcaggcagcccaggctggctttgaactcctgatcctcttgtttcagcctcctgggattaacagatgtgagccaccaagcctggtaaaaagctgaatatgaagactcatgtcccatcccaggcagggcaaccaagggtagacgatataaggcaagggaccgagacggagtgttgatggggatgcaccacaagggtggggaggacaggaagtggaagggtggctaactccaggaaccagggtgcagagggtatctagatctggggaagacccaagatgatgccaggaaggggtgggacatgcaaaggccaggccttgtttgtggctgttatcttgcttctacaagcaggaagcccagccacgagccccaccacataagacaaggtctgagctcagctactcttagcttgctctgcaaagacaggtgattgttttactgtgtgcctgaagcagaaatccccaccagcacagacaatgacccctgaccattctgccccatatccttcccattagtggtatttgttgtcaggaaactggggtgggtgggtgggtgggtggagagtctgttgtcttcttgtgctgtttcagatacatgtacaaatatggctctttctctttggctgaactgaatatatttgtgtgtgtgtgtatgtgtgtgtatatgtatgtatgtgtggtgtgtgtatgtgtgtgtgcatgtgtatgtgtgatgtgtgtatgtatgtgtgatttgtgtgtgcatgtgtgtgtgtgtgtgggtgtatgtgtgctgtgtgtgtgtatatgtgtgtgtatgtgtgtgtatgtgtgatatgtgatgtgtgtgtatgtgtgtgtgcatatgtatgtgtgatgtgtatgtgtgatgtgtgtatgtgtgatgtgtgtgtatatgtgtgtatannnnnnnnnnnnnnnnnnnnnnnnnnnnnnnnnnnnnnnnnnnnnnnnnnnnnnnnnnnnnnnnnnnnnnnnnnnnnnnnnnnnnnnnnnnnnnnnnnnnnnnnnnnnnnnnnnnnnnnnnnnnnnnnnnnnnnnnnnnnnnnnnnnnnnnnnnnnnnnnnnnnnnnnnnnnnnnnnnnnnnnnnnnnnnnnnnnnnnnnnnnnnnnnnnnnnnnnnnnnnnnnnnnnnnnnnnnnnnnnnnnnnnnnnnnnnnnnnnnnnnnnnnnnnnnnnnnnnnnnnnnnnnnnnnnnnnnnnnnnnnnnnnnnnnnnnnnnnnnnnnnnnnnnnnnnnnnnnnnnnnnnnnnnnnnnnnnnnnnnnnnnnnnnnnnnnnnnnnnnnnnnnnnnnnnnnnnnnnnnnnnnnnnnnnnnnnnnnnnnnnnnnnnnnnnnnnnnnnnnnnnnnnnnnnnnnnnnnnnnnnnnnnnnnnnnnnnnnnnnnnnnnnnnnnnnnnnnnnnnnnnnnnnnnnnnnnnnnnnnnnnnnnnnnnnnnnnnntaggtgctgggcatctaagctctgctcctcatgcttgcatagcaagcacattacccattgcagccatctccctggccctggcaatctaaaacatttctgagaacacgaaggataggcccgtttgtggggctagcaatatattctgtcatattcatgacacaaaggctataggattgtcacttaatctgggcatcccaaccagtttcctaagcactgcgtagcactcagagcagactcttttagtctccttccccatcctaccctgccccccagttacagagcatttactcaaagaataccacttttttttttttttatgctgtagtgatgtaatggctgaggatgtgttatgatttgaatgggaagagcccttctccacagactcatgtattgaaggcctggttcctagctggtggtattcttttggaaggttctagaaactttaggaggtaggaactagctagaatgttcctggagtataccctttggagttatatcttgcctgggcctcttgttcatctgtctgtccacccatccgtccatccgtccgtccatccgtccgtccatccgtccgtccatccgtccgtctgtccgtccatctgtctgtctgtctgtgtccctttcccctaaatccttctcctggctgaactctgctctgacaccccatatccatcacgagggagtaaaacttgcaactgggagccaaaataaactattcttccctagggtgtttatgtgaggtgttgtacagctgcacctatccagtgtggtgtgtgcgacatggtgtagaggtggtggggagatggctcattcgagaagtgcttgctgggtaagcaggtggaccggagtgtggatccccagtgttcacatagaatctgaacacagaataagtagctgtaaccacagagccggaggggcagaggcagactgatgcgtggggctcactggctgccggtctagctgaattggtgagctttcgggagagattgttgagtggttaagagtactggcttcttttaaagaggatctgggttgggttcctggcatgcacatggtcactcccaacttcctgaactccagtttcagggcatcctcttctggccttcacgggcactgcatgcatgtggtacacaggcatacaggtaaaataaaagtaagtttaaaaagtaaagtggagggctagagagatggactgagagggtaaaggtttttgctcccagttctgacaacctgaattttatctctgggactcacagggggagagttgacatgcacaagttgttcttaggtttgacatgtatgctgagacactcgtgtgaacatacacacacacacacacacacacacacacacacacacacacacacaaaacaaacagacagacagacagacaaacaaatgtttaaaaagcaagatggaaagcaatagaggaagagacccagtgttgacctctggcctttgtgctcactagtttgtccaagggaaccctccatgtacacacacaatcatgtacatagtcatataacacacatacacacactcatggtagaattggtagaatgctgagttaccatgttcttctgtgtgtagtctgctttgcattgtcatggaaacagtaatgaagtaatctgttgaagcagtaactgaagctcagctctgttagtgtggtaccaggcttttgagctgtcagcattaggtgtcagaagggaccccattgagggggggttccaggttttacacatgatgctcttcaccatgcagagcggtgggcgtgctcttctcttgctgctgaccaatgcaagcctttgctgtttgtgtgccgtttgtgtcgtgttggtgcctgtacttgaacaccttacaggaggtctgaggtctggatggcgcattttgggcagacggtagtgttgatatccggaaagcaagaacctaacgtgttggtttggaggtcagaggacaagcttgtaggggtcagctctctcctaccattgtgtaggttctgggggttggacccaggtcattggcctttacccactgagccatcttgctggccctatactgtgttattatttattcattattattatttattaggtattttcttcatttacatttccaatgctatccaaaatattcattattttttaatgattcctgagtattgttcaattgtattaagaatttaagaatggcatatgttgcagaggatggccttgtcatgcaacaatgggaggagaggtccttggtcctatgaaggctctatagaagccccagtgtaggggaactgagggcaaggaggtgggagtgatgggtaggtgggtggaggaacaccctcatagaagcaggaggagggaggatggaatagggggttttaggggatgggaaaggggataacatttgaaatgtaaataaagaaaatatccaataaaaaaaaagggagagaaagaaaagaaaagaaaatgactccgcaagattggattgtaagcctggtggtggtgcctccaggttcctgccctgtttaagttcctgtcctgacctcctcccatgatgagcaataatatggaagtgtaagccaaataaacccttttctcccccacccaaaagaatttaagaatggataggaaacatacatataagtttctacacttagtctaaactccattaggagctgttaggtacagatatacacctgcgatctcagcgtgtgggaggctgaggcaggaggtttatgagctcgaggccagtcggttacacatcaagatcctatctcaatcccgctagccacctccctgaagatgattagatgctgtcttagttgggaacactacacacacacacacacacacacacacacacacactcacacacacacaaacacacacacaagttctgagtgatgttatcactttcatatctggggaaacagaggcaagcagagtgaaattgctacctgaagctaccccgctgatggggaggttgcaagacaaacccaggctggctggctcagagtccctcagcctgaacaccagccatatcatgtcttgtgagttggatgaacccaggactgtggagtctgtctacccaactctaggttcttttcctagccttaggtcatatggtacctatgttgctctgtgcctgaggtggtaggattatcaccctgtgggatgagcctgcttattacagggttcctgctgggcatgtcactagagatgccacaccaacatctcagctttgcagatgatcatgtcttaacggcacactctcatagatggagagggccttttctcttcctgggagctcttggtcactgaatggcgatgagcagagaggagaacacctcagctacccatggacttcacctgctgctcatccatagactccggaagtgtcagtcacggatgtgaagggcttggtgatgcagcctccaggcctgggaagtgtgaccttcaacctgtggggcctgggcttgaagtcttctgctatcccagcatccccaagggtctgatggatggagaactagttcctagccctcaatctccccaagagaatccaacatagcacttgcccgagatgcttcacagcagccttgtcaccagaaccaagtgttcatctgtgggtgatgaacgggaagggaaaacgaggaattcaagtactcggggaggcgggggtggcatcacccatagtcatgactggagtgctgactcacgctccagcaacagggagactttgagatggtcctactcagcacaggtgtaccttgaaaaggtcatgccatgggaaagaagccagaccagagaccatgttccttgattccatgtatatgaaatatccagaattgttgagtgcagagaagtcacgtgcagtttagttgttgctcctggcaatgcggggctgaaaaaggatggggtggggtggcgtgacagtgaaggtccaggtttttcgctgtgtcacagaatattctaagattggctgtgcccatggccgtgcatatttgtgaggctttacaactcaatgcacaggtcactcgaagtggacggccttctctggtatgtgtgctatgaatattatctttttcctcgttttgttttgttttgttttgttttgtttttcatggcaggatttttctgtgtttccctgactatcctagaactcactctgtagaccaggctgaccttgaatgcatagacatcctcctgcctctgcctcccaagtgctgggattaaaggtgtaagccactaccgcctggcttgtcctattcattttctttctccttctcctcttctccctcttccttcttctctgcctctatcaccaccttctcttataaaagcaagccaccagcgctccagtggacaccagctaggtgccctctgattctgttcagttttgatagttcttggcagatggtgtgtctgatctcatagattggggtgccatccatcccattggggccccctcactttactggtttagatcctttgcttcttactgatcaactacagacttatgatgacaactatctcctagggtttgaggactttgctaaaatggctcatggacctcagagaacccgtcatcttccctggtttactgtaaaacctattacagagaaggcaggtagatgtctagatagcagagatgcatgcccagggcaggacatgtgtggagagtcctgtctcagccccatcccatgtagcttggcttgcttacatcctccagtaaccttcgtatgttcaacagctgggaagtgccccgagttttgtattgcgctcatgtaaaaacttcattgtggaagttgcacagtgcattaaaccattgcccatcggtcatacctctacctcagccctgatgaaaggttggggctgaaagtttagatcctgaaatcacctgctattctgtcaaccagctcccatcctgagactctatcaggagagctcctggtcacaggaaagacagatcagtttggagatactatgagttttagaaattgtgtcccaagatttggtggggagggtgtcagagatcaaatatgtacctcttatatcaatttatcaatatctatttatctagaatctactaagtctgcttagtgttgattacatgtaaccacttgagacccgatgacccatagggggctcttctctggagaaaactgtttgtctctcagcagtcattgattgcctgtaactcatctaggggttggggtcttgtgacatttcccgcctccatgttggttatctcagctagtggcgtcattatacaggtcttgcttaggtgaagatattacgcatatttggctgagaagatgctgtgttgcaacgggcatcctggtcgtctggttcttgcagcttttgcacctgaatgcagccattcagtgccccccccccttttcttgcttcagttgaagcgagtggcatttggggctgttggaactcaagggaaaagaagatgacaagcagaattagtcactggcatgggtggtactcttagcaacacccagagaggtctccagtgagcatcagtccctctcctgctatgatagagtaatctgggtcttatccctaaagaccagttccattggcaaagcacaaagctttagttttctgtgtctgtcttgggaaggggatgctgtgaagtagggaatcaccaaagcctttgtgtcaaccagcttttcattgtgacaacacagcagagacaacccactaagatatgtttggttttgatccttggttttgaaggtttcagcccatggccacttggctcagttgtccctgggctgtggtgacacacggaggaggggaacgtgtggtgaagcacaggtgcccatctcatggtggccaggaaggggagtgtaggtggaacgagggaaggaggatgaaggaatgatttccttccggccagaccctacctcttgtctagcactcctaatgacccatcaggttctaaacctgtcacttgaccagttcatcgacaaggcctggactctgatccagtcacctcctcatggccccacttctgatggctgttttcagtgtcgggttcaagcttctgacagacacctgagtgttggggcacatttaacgatcacaccatagcacccttcctcctgggccgcctgggaggaggcagatggcctggtggcttttggtttcctgtccacactcaggagaattggaccctgagctcagatgggactctggtcagagatggactcacagctgtcttctaggaccgaggtgctggggtcccagggctgcagggcggggctctatcctctcctgcagggaactggggaatctgacaagctttatttgttttctctcagtggacatcatggagataaaggaaatccgtccggggaagaactccaaggactttgagcgagccaaggctgtccgccacaaggcagaatgttgcttcaccatcctctacggcacccagtttgtcctcagcacgctcagtttggcaagtgggtgcacatttgtctggacatccctccgcccacccccctgccacctcctcctccttctgagagagatcatacttcatgtctgctaatgcatgctctgggaaccctggtcttgggtccccatcctactgctttgtagcttgtgtctttgggcatgggtatttaacctttccaagttgcagtttgcttggctgtgacctggggacagcgatgtggctttctccttgggacgttgtgagaagtatgttacctgtctgcctggctcaagttgagagttaaatgaaggtagttaacatggtcactgagagataggctctgctggacaaacatgtcacttgtttcctacagtggttgctgcacaataaacactcatctgaatgaccttgggtacatatgcaggcacagagcacacacatatatgcatgggcatacatgaacatagcacatatggatgcatgcacacacatgcatgtatatagtatgcaagcatgcatgcgtgcacacagcatacacatacacacagcaatacatatatgcatgtgcacacacagcatacattcatatgtatccatacagcacaaacatgtatgcccacagtatatacatgcatggctgcatacagcaatacatgtgtgcacatatgggcataacacatgcatgcatgaacatgacacacacgcaacacacattcttgaacacagtaaacatgtaacatatacgcatagcacatacaatgcacacacagcacaaaatgcatgcacataccacacatgcaaaagcacacagatgaatccacatatcaataaacacatgtacatgcatataactatcacatatgcctctgcacagcacacatatggatgcatgcacatagcacacatggatgtacatataaaacacttatgcagaactcacatatgcacacagcacatacatgtacacactacacacatgcctatacacatgacacagcatacacatctcacatatgtacatgtataaatacacatgtgagaacgtataaacttacatatccggagatgggatttctggccatctcaatggtatatccatctagagctcagaggtagagctaccattcacaaggtcccagattccagcccccagcagaaacaacaagagtcacccagagttcactgccccctctccaattctgtctacagcggactcaaaggaggatgcggtgaagtggctctctggtttgaagatcctacaccaggaagcgatgagtgcatccacccccacaatgattgagaggtacacaacccactggcatcatcctcctttgttctagggtcttcgggaatagaccaaagggagaaaatgggacatcgagtccccaagttcatcagtgccctgtgtgcagcagcccctgatagtggctaagaactctccagtgctccacataagatcctttctccctagtgttgagccttgacctttggcgtgaagagggcacttcagctgagatggaaacactcattggtgtatgtgtgcatgcacacatgtaaatgaatctttctgtgaatatctgcaagcatataaatatttgttcatatacattcttctatatgcccttcacgtggattgttttcagtgtgatatgtgtgcataggacccagggctgggccactacccctcccgcaatgaaccaacaccttcccacatataccactctttcttctcagctggttgggaattagtgatggggagttgtcctttatggaggcctcacttgatctcatggatgctccctcggggctcagacaggggtcttcagccacaggtggagtcttgttaccaagcagccttgtgaggatgttggggaccccttctccttttggggactttgtcctcattccctagagctctttgaacttgcagtatttttgactctcccctctttttggcttcacattctctttgcagttggctgagaaaacagatttattcagtagatcaaacccgaagaaacaggtaaggcccatcagcggttttctgtgaactgtgatacttgcttgtttcagtgtttggggggcaggatgggtcagtacatgccctgtggttgaaagggtctcaggttctggggttgacggtaacccagaatgattgaatgattgaagcttctgatggagtgaagctcctgtcgtgctgctgaggtgacatttgacatgggtctgggaccttgtcacaaaggctggaacacctaccacgtcctgggaacccagcaggaaacattgtgacgccgtgcctgcaatgtatgatgggagagactggtcctgagggagcaagctttgtttggtgacagtggtgtgactctgggcagggatgagggtaagatgcgatgatgtgcctctctgtgtatttcacagtccctggaggatgggacttggccagccagcacacagggtctctgtcagattctgtgtttaattccctccctctctcctccctccttccctcctccctccctcttccccctccctctacccctccctctttcctcttcctctcttcctctctctcccttcaccccatctttctgttcttagaattgaaccttaggtcttctgcaagctaggcattcactctatcccttagccatgaccgcagccctccactggtggatcctagacaagagttctactgtctctagcttcttctttttgttttcagacagaatctccctagaccattcaggctggcctctaactctctctgtagccctcaactggctttgaactttaatcttcctgcctcaggcccttgcatagctgagctgagagacctgtacctccaggcctgttttgttttttttttgttttgttttgttttttaaaaatagatactctgcttgggtttttccttaggcaaaggcagtgctcacccagcaactgtttccccattggtaaatacataatggcttctgacttcatgttaattttgtgagagccaaccttggagtgtgaacttgggtgctgtacgtgtgagtcggggacttccttagttgcccgatgccagctcccggtgtatggtggcagaatatggtgacaggggtgacttccagctgtggcgctgagggcactgacctgcccactgtctctgctgcactggtctttgtcctttgctggcctggaggatgaatggccatagcatcctttgtttaaatttgcctttctttctgagttggtgactggttagcctcttatttccttcctctaattaataaccaagcaatataggccaccctgggactggagagaaggcgccgcaggcgagagcaatctttgctcttgcaggggattcgagtttgattctcagcacccatatggtgggctcatgaccatctgtaactccagttctaagggacccaatgccctcttctgaaatccacaggtacctggcatacacgtagtgcacatacatatatgtaggcaaaacactcatgcacataaaattaaataatatgtttaaaaaaaagatccctacagacaaacaaacaagcaaacactaccctgcatggagaacttggcagtggatggtgttaactctttataatccttgtctcgagtttgtctcacattggaccttttgtttaaaaaggtttattttgagaccggactatagcttatctggtcgagtgcttgcctagcctgcatgcaggcttgacttccatcctggcaagggtggagatgcagaccacttttgccctagcccttgggcggttgaagcaggagggtcagaagttcaaggtcattgtctgctgtagaaagagttgggagccagctagggtcatgtgaagccttatctcaattaactaactaactacttagctagctaagtaactagctaactaactactttgtctttccttgattttggttttcatattcgagacaaaactaaccaacaccaacttccccattttgtccctgcatcatagaggtgactctgtccgtctgtctcttgctcatttctgtctcttgtttagtgtatccagctggggcatttgtgacccctagccacatgcattctcccttctgcctctccctctcatctgtcatctcctggctgccctctggtgtaccaccagggttgagctagtggggtgtcgtgggttttacacactgaggtcttagggtgttgtcatctctgagactgtgctcactgaaaagactggctcagggtgacagaaggggtcactctggtcacactgtctccatggtggtggagttgtctgtccacttctgtgtctttgttttgttttttgagacaaggtttctctgtatagccctggctgtcctggaactcactgtgtagaccaggctggcctcaaactcagaaatctgcctgcctctgcctcccaagtgctgggattaaaggcgtgcaccaccacgcccggcaccactatcgtgtcttatatggagcagagatggatgcctgcttcttcctggggatggattcttcaaatcctgcctagaaacccatcttcccatctgccaagagggaacctgtttctggaggtgctccctccctgtttctggaggtgctccctccctgtttctgggggtgccccctccctgtttctggaggtgctccctccctgtttctggaggtgctccctccctgtttctggaggtgctccctccctgtttctggaggtgctccctccctgtttctggaggtgccccctccctgtttctgggggtgccccctccctgtttctggagatgctccctccctgtttctggaggtgctccctccctgtttctggaggtgctccctccctgtttctggaggtgctccctccctgtttctggaggtgctccctggctgtccctccacccagctcctcttccagctccctcccagcaggcaggccctgctgcttgtcagcactgagaaatagaaagtctcaccttctctaggaggctgcagggatacttcagaaggaactttgatcccagagtgctccagaaagagcagcctggccagtttccctccctttcctgtctcccacagcctctgactaagcccgtttctcagaggaaaacagaagctgccagaggcaagaatggactggcctagctcaggcggagcccgaaccccagatgttttccttggcccaagttctgtccagcttctaacttctcctagggcaaaatggtagcagctggcttttgtgatggacttgcttggcaacagccactggattaggcacatcccatgccaaccaaatgctcccagccaaccactgggcgaggcacccattttacatgtaaagacactgaggcccagagaaatcaggtcttgtgcctaaagccagccagcatgttgaggataacacaccactctttgtaggcttgctctgcttatcatgcagacattgtttcttaccctagccaaataacgttgcaagaaaaaagaaaaataaaaaagaatttaaaatgacagtaaggcttctacagcgtcacgcttaccttgtaagaattttaagtgcacagttctgtggggttaattgcgttcatagcattgtgcagctgttgctgtgttccatctcgtgagtgggcggcaagttccagctcacggacagggtcatcattaaaccatgacaccacaggcccccctctcccctccccccttgtgaaatacagtgcggcggttggttggggttcctggtgggtccatgccaagctactccatgtgacaaacctggtataagggaggtttatttggggaagggaggggagtgagtgttagcattttgtttaagctccccacagttacctggcaacggccaggtatgcctgactcactgtaaaaggggctgttcgctccctctgtcctctcttcttgctttcttgctcccactccgtcctctcgccccttccaccctctctcgccacgtgctcatggccggcctctacatttttctctctgtctttctctgtctctacnnnnnnnnnnnnnnnnnnnnctggagcagagccacgaaggcagaaggggggtgggagtggggggaggaagcccggctgggaacacgtggggagagaggggggagggctccgatgatgacataagctgtagctaggtccctgggaggagtctagcagaatcacctgtaagctaatacctccctcctggagttctgggagccgtgtcctgttcgatttggctgccttcagtgccgtaacactcttgccgatttcacttggagtaaggctctcaaggggcttatccccaccgcgggcaagcgctatcccgtggagctacatccttcttaaagccttctttttactttttctcttgagagacagggtctcacatggttgtctaggcagcatgccttggacttgtgattccccctgcctccgacggcggagtagcagaaccactttattttttgaggccgaataatattccaaagtttgctctctctcgtgcttctgccattgtgactcagtgtgcacgcatgcgtagaaacaccggcagggagccctgcccttcctgttggatcagtgggaactggttacggttctgaggaacacctgcgctattttccatactggtcatgtcctcacataggcccctcagcagcgcacagatagtttatttcttcctcatccttatcaacacgatttccctccatccttgccccttgggttataccactgaatttgcataagcagaacagactttcttgttcagatctgcagggaccgagggaaggctgttgggtctgcaagggatatggaaggggaggcgctgcaggtgggagagctcctggatgcaaataggtttcatgtggttgataacccaagccacacttgtgcggattccgttgcattggccatcattgtaggtatgggattttttttttaaaaggtttattttataagtatgtgtttgcatgtatgtgtgcacactgtgtgtatatatgatgctcaagggaggccaggtaggcttccctggaacggagttacagacggctgtgagctgccaggtgggtgtgcagaatggacccccccccccaaggtcttttgaaaagaggagccagtgtaacttctccagtcccagcaatgtcgtttgagacaatgtttcactatgtagcccagggttgagaaatagttctcaagggaaatgaattctcacttcctgagggcatggtgaagcagccctcttcctcctcctctgccagtttaaatgtgggggtccagaccccgaagaatgtgcagtttggctaatccttgggaagtagtggtccctaaacagctgcaaatagcagggcccttgatctacacagtgaatgtaggggttgctgagtgcatgggccagtggcagatacagtgcgtggcccagttcacccatcagagtagctgtgtggggttggctgctggtgtgccaaccagcaccaatagagaacataggcactgctctagaaagttttgtgaggttagccgcgtttggaggcacacacctgtcatctttgccctcagatgctgaggactacatggtgagagcctgtcccaacacacacacacacacacacacacacacacacacatgcacgcgcgcacaggaatagggagagagagggaggggaagacagacagacaggcaggcagacagacagacagtaagagaagctgcaacactgcttgtgtgatatttgggataattgattatttctgtctacaaagagccctgatgttgctctctatcttgcatcctggctggatgccggcttgtgggattcagtgagttcacactgtaaagtgcctagataggacctggcttacagaaaagattctacattaaatatttattgttgcttttattataaatagctatgggtgagagtgggctttttttttttttttttcctaagcaggcaggtttcaggggctcctctggtgatgggtgtagccttgaaggcacccaggacccagccaggctttatagtgattggttgatgatgtctgtataaaagacaggtgtcagctgccccttgggagaagttggtttttggttgtcattcacaaaagagatcagcctggtttctggttgagctctaggatgggatatgagtttctgatttgtgtccaggaagctgatgctggggactatgaagaagcacaggatgtgcaggcaacaggactggctcttgcttccggggtgggatcaggcgtgggggtgggggtggaggtgggtgtgggtgtgggtgtggggttctgacgctcgctgcccatcagctctctggaatgaagatccagggagtcaaatctgctttctagcttggacctgtcacctggtcctggggccccctgccacaggatgggcttgtgagtaaggtactcgccatcttatgaggcaggtgtggctaagagctactgacttccttccctccagttgctggggagtactcctgttaggtatgtgtttctagagatgggagtgaggagagagttctgggaggggattcagttgttcctatcatgaagaacctgaaatagccctttggtccctgcttctgcagtgtctttggttgggtgtctggttggagtgcatgggtttagcatctcagatgctcttgactcctgtgcctgctccattactcaattgctaaatagctgcattggctcttgggtcccctctttcttactctcagtttccagatgggggcatttcctttactggtgcagcctgggctcctagggcctctgattttgtcttttcttttcttttataaaatttatttatattattacagctaagttcactgtaattgtcttcagacgcaccagaagagggcgtcagatctcattacggatggccgtgagccaccatgtggttgctgggaattgaagagcagtcagtgctcttaaccgctgagacatctctccagccccgacccctatgttttcaatctctctctcccgtgtcttgccatgtggcacaagaggaatgtcaccttctgaggcaccttctatagtctgctggcatctcagcatagccagacctcttggcccagtggtgggagcctgtgggtgcccctgtaaacaccagagccagcagaatgttgctctgagggaggcaagtagggagaaggtcagttcagcacaattcactaagagagtgttggtttaagttttgagtgtctgacaccgggcagtttctttcacacacgtttaagtacagcacagtttgggaaaaaaaagattcttgggtgctgatcaactcaatcccttctgtacagtaaagcttaaggcatgactgcattgacacttctttgttaaagtctgtgtgaacccttccatagagatggactttgtagcttgggagacaatgcttaacataagggcctcggtaggatggctgagataaacctaagtgtctggggagccaggtctgagctcacggggctatcaccattctcagccttctgggcagagaacaggttattcatctcttcccttgaagggactaccccgtgattctaacatccctggattccctagtgcttatgtgtaagcacaagggcctcgcgccctccacaggacccttgaacgctctttgtgctgccgtgggagagcaagggggcaagaaggctggatgtgactgctgtagtgtgtggagtcacacacgcggctcttctctgacgatgacaaaggccaggttgataagtgtggagacccacacttgaggccgggttctttctgagcccttttctaactctgccggatgcttggctctttggctagaaggacccgagtctcttacctgtgacccatccggccccctcatttctggtgtcttccgaaggtctttggaatgtggttgttctgggtgagactgcagtgagtctagtctaaccttgctcacacagcaggcttctctgagcttcggtttcctccgtggaggtggcagtggccctaagggctgccttgggaggcttttgaatcctgggagtctgtagctggaccttggggagcagacccctaaacgtgatgggttctattagcatctgcgtcattgttccctttgtcccctttttgacccttactctcctcttctctagaagctcaggagtagctcctggaaaattctgataccacctgttctggcttgatgactgttgtgggatttggttaggatctaggctgccctgggtccagccgcagcctccacccattctgaacggtgaggctagagcttggtgctgtgtgtgtatagatacaagggagtagggtggagaagtgccatggcttagctgacactaagctacctggcacatagcaggtaccacatgccttcccatctgcccccctctggttcactctgctttaaaaccacgtgagcatgtttccgagactcttcgggtgcctgaggcttgtggtgttctacaaaccccattgggtctcccacagcactggcttccagagccatctcccacgtgacccatgtctactaccatcgctgagggggtagggaccagcctccactatcaggttgttcctttcctctggcttaaagggccttgcttctagttggttttctcatggaggggtgccaaggtgggggtcggtagagttgtacaatgcttcccactctggccaccctgaggctattgggattgagatttctgtctttgcagcatcagcctccgggagctgaagaccatcttgcccctggtcaacttcaaagtgagcggcatcaagtttctcaaggacaagctggtggtaagtatggcagctcagctgggggacaagaatttaggcttgcttagtgcctctctcaggaacccatgctggcctggggctctgtggaatggcatccaacagagccctctgcctccgagcacattagtcctggtttatccaatggaaccctgtgactattggaagacttcttgaggatggagcaagtgaaggctatgttgctggatggtgtgacttgggacatctgtgcagatctgtctgaaccagtctgcctttcagcactttctggaccttcttgcagttggtcaccttagttacaggagcacatgggtcctttgtaaactgctgcggcagatgcctttgagagggtactgaggacatctgccattgcgttttgtcctcttactctaactgcccattttcctaattgttgtcctttcttcccccgttactgaagtaggctatgttcttgagctgtgggtgggacagccagcaaagtctctctgccccaggaatgatgggatgcagggggcaaggatagatggatggaggagatgaaggtgaaactttcccacagagagatgctgtcgggaaatgaacacgtggtccggggagcccccataggaggctcacccagtcatgtcagtgtcattcgtgggattccccttgctgaacaacttcattcctttgagtactactgagttcctgggacagcagacccaagctgatcctgaccctgccattcttggacctgcccatctcctcctcctcaagacagaaagcaggcgtgagagacagagagggagaagagaaaaatgttattattaatccctgtgtggttttctctctttctttatacatacacgtatgtatgtatgtatgtatgtatatatgtacaacacttacacacacacacacacacacacacacacacacacacacacacatacacgggtccactccctggccaaaatagacatgtagtcacatcatcatgcaaaatgtgtttactccaacttcaaagtccccatggccttttagtcccaagactgttgtaaagtccaaagtctcttaggagactcttggaattgttgtatatatgcatatgtatatatatatattcttatgtatatgtgtttacataagaatgcacatatatatacatataggctagggaatcactgacttcagaggacgttgggttgattcctccagctgttcagttcttgtgtagagggcggaggtgtgagggtggacacccgactatgtgcgctcacctttgccttctgtgcttgcaggaaatcggcgcacagaaagatgagctcagctttgaacagttccatctcttctataagaaactcatgtttgaccagcaaaaatcggtaagaggaccctcggctcttctcgtgtttgcttcaggcgcagagccgagaagcccacagggaaaggcttagcttcccactgagtcaaggacgcatgggcaagagtgaccgtggatgacttcaggagaccagcaaacggccgcaaccatggtggagctgtaggagacacgtcagggcatgggggttgctgatcttcctggtgggaattccatagccataaatttgatcataactctgagtatatgaaaaacaaaatacagtataatgcacagcacactattagatcacctaggaaggaaatcctgcaaattattcatagccttctctgagttttatgattttatgactttatttttgagacaggattttctgtagtccaggctgacctcaacttcatgtaaagctggccttgaacttccaatcctctttcctccagccaatgagcgctgggattatagagtgagttaccctgaggtagcaggttatagggtcaggaggggaccagggctttgtatgtgctaggccataccccctaatccttacagatattcaactggggactaaacatgcaagtgtatgagcctatggggcccatttttattcaagccagcatttcccactccctggccaaaataggcgtgtggaacatcatcgtacaaaaggcattcagtccaacttcaaaagtccccatggtcttttagccccgagaccaccgtaaagttcagggtctcttctgagactcttggaattgtcataaactgttaacccctgtgaaatcaaaattaaaaagcagatcacatgcaatgtacagtgacacagaatatatgttatcatatatatatcatatatatatatatatatatatatgaccacacatacatgacacatacactttgccactgtcttctgggttcctactaggatgcctccttaagcctcacttaaattcctttcttagtcactttctgttgttgttaagacagcatgcctcatccccaatccaagatgtatttcaacttacactctttcacgttgaagtgacctcgatagtagcctaggctgtcttagaacttgctatgtagcccaggttggccccaaattgactctcctacttcagcttccccaatgctcagccacaacctaaactttttattacagcttaaaaaaacaaaaagtgtgtttctgtgtaggcttgtgtgcatgtgagagagaggagagagggagaggaaggggagggaggatggtagaaaggagagagggggtgaggaggagggaggggtggggagggcggagaaacatactgattgaattgaggtttaaggactccctattctccctggaatgtgctaggtggaaccctgggaaaacattcagccatgccaaggtcgccctctggtggtcagaatgccacatggcacctgagttggtatctcatttttggtttggcctgtgggttggcattttaaaattaatgacctacatttaaaacccagaggtctaggtgaggctgctgctgctgctgctgctgcttcgtcttcttcgtcttcttcgtcttcttcttcttcttcttcttcttcttttttttcttcttcttcttcttctttttcttctccttctcctccttcttcttgctgctgcttctcctccttttttcttcttccttcttcctcttcttcctcttcctcctccttttttcttctttttccttcttcctnnnnnnnnnnnnnnnnnnnnnnnnnnnnnnnnnnnnnnnnnnnnnnnnnnnnnnnnnnnnnnnnnnnnnnnnnnnnnnnnnnnnnnnnnnnnnnnnnnnnnnnnnnnnnnnnnnnnnnnnnnnnnnnnnnnnnnnnnnnnnnnnnnnnncctcctcctcctcttcttcttcttcttcttcttcttcttcttcttcttcttcttcttcttcttcattctctttctccttttcttccttccccttctccttcccctcttaggtcacagagcccaagagaccacctggggtcaggccagggattgtgtgtccagtaagtctagaggttgcccacccagcttgttcatggccaagtgtcggaagggaagggcccacattccctgagatatcctgatggcttgatggatcattttggatgcaggtgattctagcctgaggtagctgggatgggggataggaatcctcagatttagcagtgacactctggttggtttctaccctggtgactgtccctgggctcctgaaaactcattgctcccaccttcagaagacgagactgtcagcgtgctgtgctatcctccggcccttggaaactcagttccccatcttcagccctgtgggtcttaccgtcttcctctccctttgtcggtcccttcccctgtccagctggggccttccttgagcatgaggagaataattcctccattattttagtcagtcatctgacttgtacaacagctgtttgcatgacccaagtgggtaccgtgcttggcacagacatgtcctctgaccctgctgacagctcactggggtggacaggctcactgatatctggagttactcagaccccagtgtccacccaggctccctgttgggttaggtttgaccacagagcctcaccaagaaatgctttctacatcctcatttggcttgtgagccaagtgccaaatgaggccaataatctccttgccatgcctgacaccccaccttctcaaaagaaacgtgtgtgtgtgtgtgtgtgtgtgtgtgtgagtgcttctgaatttgaacgggtagtccaaccttcaggctggtgatgagagatgtttccagacatctttccagagtatgggacacccaggtacctggggcaccccctatctccagcctgtgggtggccagaggacttgactgttggacgcagagctgtttacaagatctgtcacaggccagtgactagagggtcatttccacctagaatacatctcacctttacacaatcactgtgttattgatcaggcaggcaaggtggacagagtgtttgccaggctgttagctagaaacagtccaggagcatatgtgtatgtacatgcgtgcacacaaaagtgtgtaggtacacctgtgtgcatatgcgtatctcaatgtgtgcatgtgagcatgtatgtttgtgtttacatgcacacacacatgagtcttgtgtatgagtgcatatctgtatctatacatatatgtgcatgtgtgtgcacagggctcagccagtgagctggtgcagatggagatcagaagggaggcgcatctcagctcctcgaatgtgcggttgacatttcagagggcacaagggaagagctgatatggccctatgttccttttctgccctgaaagcagaatggtaaaagggtcatctgtgaaatattaaaggtctgaaatacagcagtaaacacagaacagtgtaagttaccgcttgttgccgggaccacagtacccagatagaagacctccaatggggaaaggctgagttgtggcccacggtctcagtccactgtggtggggacagcctggtggcactcatggagtcagagacatgtgacagagacaccagaggtggtctctggtggtggtgggggtagtgtgtgtatgtgtgatgaatgtatgtgtggtgtgtgcgtgtgtgtcaatgtgcatgtatgtcagtgtgtatgtatgtagtgtatatgtgtgtggtgtgtatgcatgtgtgtgtatgctgtgtatatatgtgtaatgtgtgctgtttttgtgatgtgtgcttgtggtatgtgtggtgtgtatgtatgtgtgtatatggggtatgtatactatgtgtgtgtagtatgttgtgtgttatgtgtgcagtgtgtatggtgtttgtgatatatgtgtgtttgtgtgtgcatgttgtatgtgtagtgctaggagtcaaatccaggtaaatacctgtctaccctgagttgtatctccagcctttgtaaaaacaacaataaacaacaatttaaatctctctccctttctctctctctcttctctctctctgtttgatgggggcatgggatgagagggctgtgtgtaccatggcatgattgtagagaccagaggacaacctgtgagagtccattctctccttccactgtgaggaccctaggttgtaaggtttggcagcacttgccattaacctctgagcagtctctctggtccagcctctatttatttatgaatcaaggtctccctgtatagtctgggttagtcttgaactcacgatcttcttcttctgccttagcctctcaagtgctgggatgacaggtgggtgccaccacattcaaaataccacattgatatgtacattttatttttcttttttctatgcctgttgagatgctgtgatttctgttgctagatcagtctaggcattgtcctacatcagtgggttttgcccaggctgagccatcttggctgtctcagtaatgtttccattgcatgagaggtgctgtggtcgaaagcaacttggggaagaaagggcttatttcatcttacagttctcaggccgcactctgtcactctgagggaagtcgggtaggaaccctagaaggacaggaacctggaggcgggaactgaggcagaagccacggaggggtgcagcttactggcttgctcagcattcccaggaccatccgctcaggggcgtcaccactcccagtaggctgggcctgcttaaatcaattattagtcaagcaaatgtactacaaacttgcctataggcatttttttcaattgaggtctgtcttcccaaacgacactagcttgtgtcaagtccgcaaaaaactaacgaggacccttgctttgataattttttaaagtaatttttcctttattattctttagatttatttgtattttatgtatatgagtatcttgcctgcaggcacataatgtcaccatatgtgtgcctcgtgcccacagaggccagaagagggtgttggatctctggaactggagttgtagatagctgtgagctgccgtgtgggctctgagaatcgaacccacatctcctgcaagagcagcaactgctcctgactgctgagccatttcttcagcccactgatgacttagcaaacaacaacaacaaaaaatctcaccggcataagctgatttgtccaatgctcttatgatctgcttgtttctcgtttcagatacttgacgaattcaaaaaagactcctccgtgttcatcctagggtgagacacctcgggcacgttgctgctgttcagggcctctgtgtccttgtagctctggtggcgggtgggggtactgtgtgcagttactgaccccagctttgtaggacagcaggagcgagtgaacagaatccgtaaggtgtggagtattgtgaggagggtctagaagattctgtagggaggaccgtgacctcaggctttcttcccgtaggttcaggggatgtgacaaaccaataggtttctctttccccctgctttcccctcctccccacccccaccccttctcttccggatgcgcctcttccctctctggttccattctgtttgtggactccacattctgctgtgctccccagacctcctggagctcctgagtgctgtccggggcctctaagactctttggttgggatccctctttgagtctcttaaatctcgacttcgagggtcagtggtgtgctcagcatggctgggctggggttcagggtagaggtgaaccctctctctaaccaccctgtgtcatttctctgaggacagaaacacagaccggccggatgcctcggctgtctacctgcaggacttccaaaggtttcttttacatgaacagcaggtgagaggattgtgaggtggggtgtcagggacaaagtgcttccctggatgcctgctgtcatagaatagctgtggtgtccctgaggtggggtagggccttagactgctgtccaatatcaccaggtttcctcaaattcccagtctctctctctctttctttgtttctttcttttattaagatttatttcttttatgtatatgagtacactgtcactgtcttcagacatactagaagagggcatcgaagcctattacagatggttgtgagccaccatggggttgctgggaattgaactcaggacctctgggagagcagtcagtgctcctaactgctgagtcatctctctagccccttccttccttccttccttccttccttccttcnnnnnnnnnnnnnnnnnnnnnnnnnnnnnnnnnnnnnnnnnnnnnnnnnnnnnnnnnnnnnnnnnnnnnnnnnnnnnnnnnnnnnnnnnnnnnnnnnnnnnnnnnnnnnnnnnnnnnnnnnnnnnnnnnnnnnnnnnnnnnnnnnnnnnnnnnnnnnnnnnnnnnnnnnnnnnnnnnnnnnnnnnnnnnnnnnnnnnnnnnnnnnnnnnnnnnnnnnnnnnnnnnnnnnnnnnnnnnnnnnnnnnnnnnnnnnnnnnnnncccccccgccacctcccctctcctccagatctacttccccacccctttcctcttcagaaaagagcgggcctccaagagacagcagctaaacaggaccaaaccgcatacaacaaggcagggcaaaaagctctcatatggaggctcgacaaagcaacccacaaggaggaagagtcccaggagcaggcaaaagagtcagagacacacctgcgcccattgctaggagttccacaagaacaccaaacgagcattcctaacatctacatgaggactgggtgcagacccatgcagctcccatgtctgccgctccagtctctgtgagcccatgaagttttagttagagcaggaagacagctgaaggagatcaagggcgttcacattggaaaaggataacatggcgtgctgaatcttgtcgcgacttccaatgagcaagcaatggcaggggacttgagggcttgaataagatgtccctcaccctggctggtgccagatcatccccaggggccacaccaggagtgttttcctgggtggccattccttctggatgggaggaggtgactaggctgaccaaacctgctggtcccctgggggatgagaactaagactccccagatggcatctatgtggtggctcctagtgtggtggaagagtcacaggagtttcctgttgggatgtcattatctgatggtacaaagtcaccctagtatgtgtgtgtgtgtattcttgggtaccatgctggtgtctggcgagaagatgccgttaaacgttcccctgtgatacacgtttttgagacatgttttactaagttgctcaaactgccattgaactccctctttagcccaggctggccttgaattccttctatagcccaggctggccttgaacttgctgtcctcctggctcagcttcctgaatagctgatacaaccattctgtaccttcacactctatgtttgggctctatcatagtatagtgatagaaagggactagtgatcagagagggacatttaccacaaggttaacagcctgaggttgggcagtggcagctgctggctcggggtgctgggcatgcataccacgcctgacagcatggaacactgaatgcaggtgatggaggagagaggttctgtttgcttagcctgagtgagctcttaagacccaaggatgttaaacacagtgggcagtgaattctgttgggcagtctgaggacggcttgctgggactgctaaaagctttcctcctaccactagtgtcctagcgatcagattttaggttgttgggcttggtggcaggtacctttaccctcaggccaccttaccatcccacatttgaacccctagcatcttgggattctaaacttctttaggaagatcctggtctctgcccagccagaaagcagcctccagttctattagcaagtgctcatgtcttttgataaacgcgtgtgctttgcaggggaaggagagaagggccattcaggccctttgaggtacccagggagccaaggtgtttgcactaagcatcctgcacttgtggtgttgcttcttggttctccccccacctccacccccacagccgaggacggaaccccgggctagtgctctaccactgagctaaatcctgaaccccatgctctatgctgttaacaaccttccattcagggaactcacagcctgctggctattttggtgtctgtggtctggggagacttgttagctagccacagtcctgtgttgctgaagtagggcctcaccatcctgtttcagtctgtctttgggcttttgttctttctgacacacccccgtccccgtccccccacccccaccccaccccgtgtcccttcctacccaatcacacattcatctcagacacaaggagagacactggggaatgtctgaaacccagaaggcattggccagcatcgggtctgtggtatcgttcatcttgttgcctgtggatatttgaggtttcggagaatgtagcagaagaaaggtcactgcatgctgtggttttttattaaggaaatgtttctggaatgtccagcattgtactgaatctgctagtggggctggatttgtctatcggggtggctctgcctggctgacccctgggggaggggatgcgaggtgtccatctcagttcttttgcccaggttgagtgatttggaaattgaccctggttctcatgagctctggagacctgggatcgtcttgaagtcatcctgagcctgtgtgtcctcttctctatgtgacagtgacatcatatggcttgcagggtggggcaggttagaggaccatacggggacgaggctgttagaataaactaccagaaactggaggcttcctgcagcgaagaacactgcactaagcacacaactgacttcatgtggtcctgtttccaaacctgcgcggtgtataacttttgggaccctcctttcatggatgaggctgtataaagaagacacgtgacttgtcaccttggctgagccaggggagacaccccagtaggctggctatactgtatagttacttttctcgttgctgtgaccagaagaaactatttcaactgggcaggctttattctggcttagacttagaggggctatagcccatcatatttgggaagagatggcagcctgtgggaacagcacagtgacaggaatcggagctggtcacatggcctctctcgtcaggaacaggaagtggggctggactataaaacctcaaagcccacccctagcgacctacttcccctagcaagcctcttatctctggaaggttccacagcctttccagacaatgccatgacctggtaacccaggtgttcaaacacatgaacccgtgtgtgtgtgtgtgtgtgttggggggggcggcatttcataattaaactgttaacactggcatagtccaccacagtccctggctgtttcatactgacacccgtggcctagtgctctgagttcttagcagatcatagtctgtcgttacttttattgataaagtttcattgcaatacagctatgctcattttcctgtatttggtctgtggctgcgttcacacggtggtgactgctgagtgaggatagcgggtgacccatgcagaaggcatctgctcgcccctggcaaagaccatgccaggatggagccttatttatgtggctctgaatgacataggtttgacattgggtccagtctttgatcaccttgactaggtcctgaggaggaccttgcctgtcctttggtgactttgtgttatcttcgacatctttaaggagctatgggctcaggatctgaacaaagtccgggagcggatgaccaagtttatcgacgacacaatgagagagaccgcagagcccttcttatttgtggatgaggtgagtgggctggggcatgtcacgtgagcaggacttcctttatcccttcccctcggaaggtgtcactgtcaggtgtccgggggactgactccgtgtaaggagtggttttcccagggtggggattaatcctgcttttcattttcctgattcttacctgggtgggattacctgtttcgccactagagggcgttcgccatcagggagaagccaactgaacttgacaaatgtttgatggttgtgtgagccatttatagaggacacttctttttacaggtggccggggaggatcagaagggacatggcttgtcacttgctcgctggggctgtttatggcagtaaaatgtacctctgagccagtcggtgtttctgatttattattattattatttaaatgctaggagtgggtagatgggaaagtccctgggccccttctcggcctccttgtttttgccatggtaggaactgaacccaggaccttctgcatgctaggcaggggttctaccacagacctataacagtgggactctttgtaatgtttattttgtccctccacccggcccccaggaggtcagaggacagacagccttaagtgtaggtcctagtatgcatccttatttgaagcagggtctctttatgctgggctcccagaccttggagcttctggggttttccccatctccattttacatcacagtagaggaaccatgaagccatctctccagccctcttctcttttcttattatttatttatttatttatttatttatttattttaaagcttccaggagttgggacaggaaactctgtccctttctctctgtttcccttttatcttcagtttttttttttttttttaaaacctgaggctttgtacccattagccaatcactctaccactgagctaatccccagccctccttttctttttgctttgaggcaggttctcagtaatttgtccaggctagacctgaactccctgtagcccagacaagccttgactctgatcctcctgagtatctgggatgacatagctgagcccctaggcctggtgtctttccaccctttgatgttctcatatccagagtgctctgtctccaaagctgtgctggactcgcagaggcttagtcgctgatacaatgtaacgcttcggtgtgggcagctggagctctgacagcagcagacatttgggatacacgttaaaaagggaaatggtgggtaggtccaggaggtgcttatgttgatacggggtgtctaagttagggttttactgctgtgagtagacaccaccaccaaggcagctcttgtaaggacaacatttaaaattggggctggcttacagcttcagagattcagtccattatcaccaaggcaggaacatggcagtgtccaggcaggaatgatgcaggcagagctgagagttctatatcttcatctgaagggtgctggtggaagactgacttcagggcagctagactgtcttaaggctacaccaacagacacacacccactctaacaaggccacacgcactccaacagggccactctcactccaacaaggccacacccactccaacagggccactcccaatccaacaaggccacacccactccaacagggctatgcctcctaatagtgccacttcctgtgccagccatatataaaccatcacaagaaggatggctgcaatcagagccatttgtactgaaacctcgagaaaccgatgtctggggaccatctataagtttcacaggtcagagccgccttgcctggctgctcaggtgccagctaagaataagtagactctgtgcctcttgtgccacggtgactccgtgttggtcgtctctttcagttcctcacgtatctgttctcccgggagaacagcatctgggacgagaagtacgatgcagtggacatgcaggacatgaacaaccccttgtcccactactggatctcctcttcccacaacacgtgagtttccggatgagcccaggctggctccggcagagctggctgtgaatgggtggggagggtcaaaggggtccgggaacacagctctctttccagccagtatctatggccttttaaactttttttttttagattttttatttattatttattttatatgtaaatacactgtcgctgtcttcagacacaccaggagagggagtcagatgtcattaaggatggttgtaagccaccatgtggttgctgggacttgaactcagaaccttcggaagagcagtcagtgttcttaactgctgagccatctctccagccttctatggccttttaagcaactttacagagcagatgttttatgacttggtcatcacaccatcaaaacgttcactcagccagtgagctggtatttgtggaaacatctgacatgggccaggctcttcgcctatgaggtgtgtggactcctcagtgaacgagggagtctcattccctggtgcttagagaagaaggcttccagtgactgtcaaccctaggcatcagctggtggctgaacagaggcagggtgagaaggagagtttcctgcatgtgctaaggccctggggcaggaacagctgggaggcatttttaaggctggagtgagaatgaagagtctgggagggtagcagcaggctagagggccagcttataagtcacagagagtcacagggagcctccgacctcttcacccagagagtgacagagctcatctacttctttgggtaattatgctgattgcaaatgagtagggtgatgaagggagtgagcagggatgctgcctcctggcctcagtgttcagtcagactttcagggtgagggtttgtttgacttctaggctgcaaagtgctctttcaaacaggggatgagaaaatcccctctgcccccgtgtgtcatcctctaggtatttgggaaggtgaccccttttccaggggaatgggtaggcggtgcatctcgagttcttatcttaggatggtggattctccaagcctagagacagctgaggaattgtcctgagaaggcaggtggtctggagagaaggcaaggcgatagtcatttgtctttcaaaacatcaaaagctctcttaaataacctaatcaatgaatgctctaacagaggaatggatacagaaagtgtaattcctatgtaatgcatatatatgttacacatatatcacgatagaactttgcgaggctgtggaggaaatgagaagtcatgacatttgcaagaaaatggattgagccataaatcattatgttgagtgaaataagccagatctagaaacatgactactgcatgctttttaaaaaaaacatattttatggtagttttgctgactaggttcatggtaccgtaaattctaccaggatttgctgagcctgcccacgctggccgcagatctcagtgatgaagcatgggcctatttctgctgatacccagagcccagtgggcagctccaggggtcattagcgcgggttctgcttcgtcttcactcctgacaccctcagctcaggtctccaaaaggtccatactgtcttcattgcattcagattgcttaggtagctatcgtgcacatcttattggtggttctggacccaagacctcaggatggcgtgcgtgtggcccagaccttagcctgggtgtttctccatcagaagatcttgggctcagacggtctccaagcatgaactgtgtacaggattgcctctctgactcgggtcattctgtccctcaggtacctcactggggaccagctgcgtagtgagtcctccacggaagcgtatatccgctgtctgcgcgctggttgccgctgcattgagcgtgagttttccgtcttagccaagatgatgcaataagcaaagctacgattgctcagtgcttgcttgttgcttttattttattttacgtgtgtgtgtgtgtgtgtgtgtgtgtgtgtatgagacagagagggagagggagagggagagggaaagagagagagacttcagttttggtgggagatggggagggagacaggctgagaagtccccatgcagagcaactctaggcagggaactgaggtgactaaggattttttcctaaaagataactgtccccaagcaaaagtgacatctggttgggcaatagattggctggtgcacctagaaagagtctttataaagtgggaagcaggggaccagcagcaaggtccactttctgctaagaggaacacagacacatactagttagcatgacacaccacacccaggagccacatgtctgtaggtgagggtctgagagcaagcatgacagggacagtcaggggcagtctgtggctgagcagatggcaaagccttgcttttgtctgccttttttcctcacctctttggctctttgtgtgtatgtgtgtgtgtgtgtgtgtgtgtgtgtgtgtgtgtgtgtgtacatgcacacataagtgtgttcacatgtgtgtatataaccatgtgtataacccagaggttgacagcagttgttttcctcaatcactctttatttttaagaaagcgtttctcagtgaacctgtagctctagcctagctacagcttgtctcatacatcccttgtctccacttgcccagtgtctacatgggctctgagatttgaactctggtcctcatgcttacagagtaaatactttatcccttgaactatctccccagctcatctttggttctatccttcccagactcattctatcaccaaagctcttatgtgtctggattagttagcatcctatcactgtaaaacaactgaggtgttgagcttttaatggcatattgttctgtatcttgggttgggagcattgctttgggcctttgatgataggtcatggcaagaaaacgtggcagaacaaacactttgaccataaggtagaaactgggagaggacaaggaagaggctggggtcccacagtccctttcaaggacacagcctcaatgacgctactccaggaaccacgctgggtgacacttttctaagccatagccatgtatgtggctaagaaaatggcccagaccatcgatggcaccttaagtgtttcaaacctgctcgttctgtgccagagattagtagcagttgccctcaggcttcctgggtttatgctttttcctttggaaaaagagctgtgagaaaatgaagtcagaagtcaccagctttgatatccaccagtttgttaccatgctcccacagtcttattccatttgcataatgactgaacctttaaaaaaatctgtctgtttctaactggcaaaagaggggagccttgaacagcggacacaagcaaatcaaacccattttgaatattttataatgaatggctcactagaaggagtttctcaggaagtgtgtcatgttctgcaagtctgtagataggaccatggatgtgtgggtgaacctgggtcagccttgggaacagagctgttatgggtaccagagcctagcctgatggcctcagcccaacacgtgtcttgtatactggttcactcttggtggccgtggttgatggtggctgatgctgagggcctgtgttttcccctcagtggactgctgggacgggcctgatgggaagcccattatctaccacggctggacacggaccaccaagatcaagtttgatgatgttgttcaggccatccgagaccacgcctttgttacctccaggtcagtggctgatttcctggaggtgtgggcctgtaagggaaaagctgctaggactggacgcatggatggatggacaggcagacacagatacacacatacacacattgcccacttctcccaaagcctgggggagcttggactccatttggctagttactatcaagtggcctttgtgtccttaagacatgataatggcccttaaatattacgtttattattgtaattatgtttatgtgtttgtgtgtttgagtgggtgtgtgcccatgagtgcaggtgctagcggaggccagaggcattggctctccagctgagttacgggtggctgcgagctgcctgagcttagtgctggtaactaaactgaggtcctcggagagagcagtatgataagctcttaaccgcttagccgtctcttgggactagaacccaagagttctagatgcttttgttccggtttgtccagtgtaaccgctactttattgggttcttctttctaccacccttctccaccccaaaccctttcaaccccccaacaccaggtaggagagaaaggaggtgagagaggaaaagggatatcaatcctgttagactatttcctgctgattagcggtgttgagttccttgggggcaagtccagtctttgtctgcaggatagccactttctttttcctatctctttgctcacgaccattgacaaactgcagccactgcaaccagctccagcttcagcctctgcttctgtcggggctctggccttttttaatgtcctttcaagagtccccagaattccaagcgtgaagtatcatcagctggcagaatcatgcccctggcatagcacgagacaaatcacagtcagctgctatggataacctgaagcatcccctgtatcccgcacctgggattgaagcaaaaacatagtcttaagtaacatttctatgtctttaaagacgccaaagttctcatagtcctgctctgtgaatggccagcctttgtggttctttgccaggatcctcacatcttagcagccatggtgatcactgtatggacctggaagggtcgtgtgttgaacgctaggtgccaggcacggtcagcgttcagtaaataggaccggaggtttctgaggtgattcctgcctgagttccttggatcaagtgtggggtggggctgagacagggatgctgctgcaagcatcttctctcctcagggagccttttagccagactacagggctcatatacatccttccccatgtagcctcagcccttccttgggcattcctctctctatctgccactgaagccccgagggaccctgtgttcccagagatggtcaatgcccactcagactttgttagcttcctatcatgatgaaaagatgctgctatatcggatttacagagagaagggggctcaactgggatcatgcttcagagatcccaattactgacctaccgtccaccctgccccagtgcctgagaaatgggtgttttctgaccagtagaggcaatgatgaaaggttcctggatcttgtccccctgctgactctgtcctgtgccacctgcagcttccccgtcatcttgtctatcgaggagcactgcagtgtggagcagcaacgtcacatggccaaggtgttcaaggaagtgttaggagacatgctgttgacgaagcccacagaggccagtgctgaccagctgccctcgcccagtcagcttcgtgagaagatcattatcaaggtaggcgtgtggggctgctgtctacctgggactgccatcattgagggtctgtatcagaggtctggtgccagactccaggtcccatcttccttaccatctctctgatcttggtaagatcttgatcatttaacctctgggtgcctctgtgcccctctggtaatggggatgatatagaatctagttacatagtgaccttggtaggagcagttctgggtgtgtgtgtgtgtgcagaatggttggctcatactaccaattctaacttaggaagacgatgagttccagccagcttgggctggagactcagtcctagtgagactctgtcttaaaaatgaagcaaatggaagctgtgtgagcgttggggttccagtggctcaggccccattcctgcccttggggtctctcacactatgtgagatgtggatagctgcttaacagggtttgagtgacagtgggatgctggggctggtgttcttgttctatggaggcgacacgtgatatcggactttggggacatcaacatttgtatacttgtgttgttaggataaaaagaccagatgagtagtgaaataaagtatgcacatgtttatatttctcatacaaggtaggatgttttaggagcattaggctttggtccccaaagtgatttggggactaaggatcctgacgtcctactgtagctgcatggtggggattttcagtggggtttccacaggtccccaaaaagtcagagttagaatttagcatggaggaagggacctgggagattggatggggaatagcgcagcttattaacctataagcgacagtaacacttcttctcttttgctcagtccccacctcccacaaaagcacaacttcctggagaataaggaaacagaagcaggtttccagctggacagaaggcagggatgggataaagatggagaggcaaggagggatacctccgagggaggagagttcgccaagcacagagctgagattatagggcatgacagacgagttggcaaaggtggaggtggagagagcagtgcatgccgggtggcggatggtggctgaattcttgttgcttcaaagactctgaacttgggtctccagtgaggagggctatgtgaactttctccccttcagcataagaagctgggtcccaagggtgatgtcgacgtcaacgtggaggacaagaaagatgagcacaagccccagggcgagctgtatatgtgggactccatcgaccaggtgagtctgggtccctcctcccctcacagagccttgggtgctgactctcagctgtcctaggcttccaccctaaagtctggcactgtccctgcctttgcccacttggagccatgtgacttgtctttttttatggcattagaatgttttcaaataatttcatattccatatcataagtacttatacacagaccaatgtcatagaccctagattcataacactcccatgatgcaccacagctgagggctccttaccccctgccctgccttgaccttgcagaaacctctcccaaataggagtatctactatgactgcaactaccggagcacccacagggctgtgacaccatcagctccttgtggatcttctttccgtatcgtgccctttcctctttgttagatgaacccttttggagggctcagtctgtggctgcatggctctgttgcttctgcgtcgttagttcactgtgaggcagagcatcctgacagggaactgtgtatgtgtgaacaagccaagtgcctcactcacctcatggtgaatggggaggcagagaagataagagataagaggttagcccttcagctgggcgtggtggcgcactcctttagtcccagcacttgggaggcagaggcaggcggatttctgagttcgaggacagcctggtctacaaagtgagttccaggacaaccagggctacagagaaaccctgtctcgaaaaaccaaaaaaaaagagaggttagcccttcagaggcaaagcctcatctccttcagccaggccagctcccagctgtctgttcacttatgaacttatcaataaatggactaacccccctcatggcgtgggtcattcccaaaaccctactggttgacaagcaaccctttaatacatagtccatataggaacaggctttggattaagctatagcattcactaacatccttttcccatcacatatattagcagtcaacttgctgctatgtattagcaacatttattagcaggcaacttgctgtggccttccaacctgggattgggtccaccctaggtaatcctcattattatctccttctccttcttcccaccaccaccaccaccatcatcatcatctttttcttcctcctactccccctccttctcctcttccttttcttaatattatttattatttgtggtggaataaagtctttcaagctttaatgcttctcccatacctcctgatactcctattcatttgagttatccaaaggcctgtctgttctagtaccctataaatatgaaataaggagaatttaagtaaatctcaacaaaatgtcacgcatccacagtggagtccgattcagcctctaagaatgaaattatatcatttacatgtggagcctgggatgtgaaaaagataaacaagaatattggtgctttatctcatatgtggactctctatttttaagaaaatttaaatatctgggggatggagagatgtctgagaggctaattgcgtttgctgctcttccagggtattttgagtttggtgcccaggatccacatgggaggctcacaaccatatctagttccagcctcaggggatctgatgacctcttgtggcctccatggacactgcactcatgtgcactcacacacacacacacacacacacacacacacacacacaccccttttcattcatacacacacacacacacacacacacacacacacaccccttttcagtcatacacacacacacacacacatacacacacacacacacacacacacgatttgttacatataaatgcatgcagttataagcatttaaatttgtatgtgtgtcatggatatgagtggtataaaagtttatatcactatttgttgggaatgggagaagcacagggagggaggatcatgaaagaggcaatagggggacggatctagtcacacaatgatatgtatgtatgaaaaatatcataatcaactctattaaaaatttttttttttttgagacagggtctcactatgtagtactggctggcactgaactcacagaaatccacctgcctctgcctttggagtactgggattaaaggtgtgcagcaccacacctggcacacctacaatatatataatatataatatataatatataatatataatatataatatataatatataatatataatatatagttataacactatttaataactatagttagaatatttaacactatatagtaacttttaaaaattagtgaaataagaacatgctgctaggtcaattggctgaaaggacccagaaaggcttacaaagcaggtgacaggctggggacgtagctcagtggcaaagctcttacctaacatgcatatggccctggggtcagtttccagtactgaggaaaatgtcagtgaatgaggaaaagttactagtgaggttgcatgatctgatctgctgctgactgtcaatgcagcaggaaatctgtatccgctcttatccgctcccagaccacccacttaaagagtcctgaacaataccaagaatccagaagtagctgttttaagagcagatcttataaaaaaaaatcattataaatgtgaaaactggcgccgggctgccccagtgaatgctggggtgatgtcccataggtcctcagagtcaatagggctgagaccttgggggagactaatgccagcctggctctctagaaatggacgcgccactactgtgccattgctgacgccaagctgtccttcggtgatgacattgaacaggctgtggaggaggagccggtccaggtgggtggagacctgcttgccttcagccttctggtcttgtccttggagaatccccacctggagacttactgtgtggcttctcatacctgggctggcttgagcatccttagctctagggcgatattgctttgggtagcaaagcttaactagctcttcctgattggctagctagcctagggcttaaccagtaagatttgaggctctttcctgcttccaatagggtctgactggcctttgtccaatgccagcaatccccggagggtgtaggtgggaggtgtgatggaggcgccccatgccctgcgctgcatgttccctctagctgctgcccatctttggcctttttcttgagtagagtccaggcctagttcaggcttctggtactgggactcctgaacccctgccttaggactcctggaaacagccatcaatgagttgtcaggagagggcagagcgagctgtaataagccctttcggatgcttgtggctcaggacactccccccacggagctgcattttggggagaaatggttccacaagaaggtggagagtaggaccagtgcggagaagctgctgcaagagtactgtgctgagaccggggccaaggacggcaccttcctggtgcgggagagcgagaccttccccaatgactacacactctccttctggtaacgcccccttcctcggaggctggtgggtgggaggtggtgtggtcaggctgtgtcctgcctggctctgatgggacatccctgtctctattcccaacaggcggtctggccgggtgcagcactgccggatccggtctactatggagaatggggtcatgaagtactacctgaccgacaacctcacgttcaacagcatctacgccctcatccagcactaccgtgaggcacacctgcgctgcgcggagttcgagctgcggctcacagacccggtgcccaaccccaacccacacgagtccaagccgtaggttcctaggattgggtgggtgacccatggaggtgtgaccactatggggttctcatttccaggaccccgttctctttgacaatgtgggttcttagaagtctatgataactattcccacttgtcagactttgtcccatcctctctctctcttctctcttgcttgttctttaataattttatttgtgcgctcatgcgtgagcaagcatgtgtggtatgtacacgcgcgtacagggccaactgaagccagaagagggagttgcatcccctagggctagagttaaagacagatgtgggctgtctgccatggatcctgggaactggttaagagcactcactctttttttttttcatttcagagatatttatctatttatctatctatctatctatctatctatctatctatctatctatctatctatctatctatctatctattgtggctggccttgtgtaggtactaggccacatgtcctggaaaattaggtcacatggctgcttccatcttggtgaggtcagcagctaagatggctgccatcaccatggcagcttctatcttggtgagatgttttctcgaaaatcctgggctcatcctcccagtcctgtatgaacttgggtgtcctggctgtaatcccaggactcagtagatagaaacagaaggatcataccatctggaccattgccactcctgttcaaaacgagacacttgttatggtggctcctggagctcccatgaccagcttcattcttttccttcctccgagtttctgaatctccactggtctgccatgtgcctccggaatcctctgcttcgtcctcctcacagcctcacagcatcgctttcctgtttgccaccattcactgtgatttgggggtgggggtgactctttttttttttttaagctaaaaaaaattatgagtatgagcggttttgcctgcatgcatatatgtgcacggtgtgtatatgatgcccacagaggccagaagagggtgtcagatcctctggaaccggaattgcaggcactttggagccaccatgtgggcccttggatcataagcgccattagtgctctaaccactaagctatctctccagttctcaatgttttgttttcaacccagggtttctctgtgtagccctggctatctggaactcactctgtagaccaggctggctttagattctgagatccacctgcctctgcctcctgaggggagtgctgggattaaaggtgtgtgcagcccagctttttttgcgtccttccttcctttccttccagcttccacttctctctcccctccatgatttcttccccctttcttctctttcagtgccctgaggtctggggctttgatctcagagaccggtttgggtccgcagtgtctgtgcttgtcaaggctccctctgtggtcaaaggaatcacagtatagggctcacgatagcaatcacggcagtacgtagtactcacgctagtccgtagtactcagccagtactcacactagcactcacgatctttacttacgattagcaatcacaaggacgagttcctttctcctttccctcttttatccgcgaaagagagagttccaggccatccctggcaaagaggtcaacacattccagaaataccaagataatcgttaagcaggtggatttaacatttttgcttttggaggaagctgaataatttacagtgacattattattagtgttgttattataataatgattattattaacatttcctgttttcataccagttgcctttccaaacttgtcattttgtatctttagtaaccaaaatctttctgagcctcacccgtgttccctgccccagatgtttccctgcgacactgctgtagctctccagcctttggggctgggcaggtgggcagagaagagactcccctgagtttcaccttgacctcctcatactcctggggtcttgataaaaacattgctgcctttcttccagacaggggggcttattcctatacccccagctacttgggaggctgagctgcaggtggatcggaagttcaaggccagccagggctatatgggagggcacgtgcctggagtgcatgtgaccttagattaacccttagtgctgcagtaaaataaagcaaaagttcaataggaatcactgtctttggaggtgtgcaaggtcagggaagtcacagcatggtttctgtggcagtttcatcgtcagccccaggtgtccctgtctgttggtattgcctcctgccggctctccatctgggaggaccctcaccagcttgttttcctcttctggatgcaggtggtactatgacagtctgagcaggggggaagcggaggacatgctgatgcggatcccccgagatggagccttcctcatccggaagagggaggggaccaactcctacgccatcaccttcaggtaggcgtgcgggcactgtttgtacctgagggtgagtgctccccagaggagacatagaaaggacacgaatgcagcctgaggaagggggaactctggtggaagcagagatgcctctccacgaccttgaccccattgtcaatggcaaggacagcaatatacagaactgtgtgagtccacagtaataggtgcaagtgctctctctctctaatagtctctatggtccttctgttttaacttcaagtaaccccaggatttaggagctatgaccaccattttgttttctttctttcaaacaaaaattgtattattgttgtatgtgggcatacacgttctatagggtcacttgagggtcagaggacagttttgtggagttggttctcaatcccacttcccacgtgttccaggcattgaactcgtggcccgttgggcttgcannnnnnnnnnnnnnnnnnnncgttgggcttgcacgccagttgctttgcctgctcagccatctcactgataagcctaccatctttcttttctaaggcatgaaatgaggcacagtgaggctcagtggcttcttatagcatgtgggggtgggggctgggcatagaacccaggtctgggcttgctcccctggcccccccactcctttgctgtctcttaggtgtgccagatttcaaccccagcaccacactccttcctctcccacaagtatttccccagcctcacgtcaggtgttgtgccgatggcagtagcctgtattactgtctcccacactggcttgtctgtggtgggctgacccagttattcgaagtgaggagatagtagttcggagcgattaagtgatgggtcaagtaccacacagccttggagttggctgagctggatatccaggacacgtacgcagcctgtgccagtctttcctggatctgctccaagaagaggctggggcccagttgagacctgtggtggcccttgcctcagcctgcctgattcgaaagaccgagtcacttcactctgaagttcatatttggcagaggggccgtcacagttctgggtccatgtttctgtagcttccagatgtgcgcagctgccgtggggtatctagtgtgctgctgctgcccctttgttttgcaattggttaccttgtcaccctgcgcccctgtcatcgggccttttcttcccttcctacctgcactgaggcttctactcagatacctcctggaggtcattgttattggcttgctgaagacctaccagctactgtgccagctccagtcagagagtcctgtgtccatgtggcaccactgggaacaggggaacagctggcaggccctgggcctctttggcacctgtgttgtttattctctcttctttagaacactctaagtggtggtgcccgcttagccttgaaggaagttggtatgtttattcatgggcgtgctgtggacgccaggccctgcgcaggggcagggatctcactgttgtagtcctgtcagtcaggatgcttttgtctgtcagtgactggttgcatctggctgaagcactgagggttgaaggtgtggccacaagatgaggagttcaggaccgagtctggctctgtgttatctattcagccatctacccaagggatgccagaggcacgctcagccctctcagctagcctcgccctgggctcccaggacaggggcttttatctcacatctatctgtctgtctgtctgtttatctactatctatatctatctatcatctatctgcctatcatctgtgtatctatctatctatctatctatctatctatctatctatctatctatcatctatcaatcatgtatttgcctataatctatttatccatcatctatctatctatgtatccatttatccatccatccatccattattttttgagatagtctctccttatgtatccctggctggcctggaactcacagagatctgcctgctctgtctgcctccggatgtgggggtcaaaggcctgcgcccccacacctttttgataccagctcttctgacctatgagagggctggcttgtggtggctttggttttcatttttagtgaggtttaacagtttccactcgctggttggccattgatgtctatttagagacgttgcccattttctgtcagatttttgttgttgctgtcactattccgtcacttgcgttccataaatctttgaacctgaacagatcgtgatcagatgatccgtttgcaaatgttcccttcagttctgttctcttcttgaagtccgtgacatctttggctatatagaagctctttggtttaatgtaatcatacttgtctatgtttacttttgcactcatggggctctctggctgcttttaaaggtttgcaccccaaaaactcagctattagctattgcacaataattccaagttggggagtgccacgtgtttgactttgctttttttttttttttttttttgcttaaatttgctttggctgttcagggctaacgtcacagaaataaaatcaatcagcacatgatatttgtccaaatttgtagtgtgaggttttggctcatgtatgtatgcataggtagtgactacagacttttgtcatttctttctggtgaatacacagggaagacacttgctttctaaattaattacttagttaattaattaatttgtgtattttgcttgcatgtatgtctgtatatcacgagtgcctggtgcctgtaaaggccagaggagggcgtcagagcccctggaacgggagttacagacagttatgagctgccatgtaggtgctggaattgaacccaggtcctctgtaagagcagaaagtgctcttaacaacagagtcacctccccagcccagatactcttgtctctaaagttaggatcagacccgatttttcttatttttctaaatcaataaggctgaaggatcagttgtctgttctgtttggaatcttttctgcctcttgtttcaaacagatgaaaaaggaaaaaagaccaaaacaacttatcatcctttttgaaacaaaacaaaacaaaacaaaacaaacaccaaccattgtaactctgggccactggaggcaagattcaagaacctgaggactgattggagttttatgcaaggactggaaagccctttgtggaagggcccacggagcaaacactttcggcttcacaggctgaatagtccctgttgcagctatgtaaccccaccatccatgagagaaaatgaccacagcatagacacaaatgaacagtggtcatatttcaataaaactttatttaaaaaaaccaaacaaacaaaccagggagcaggtttagcttgtgggtcatacatagtatggcacctcagtcaggttgaaagaagagctgggtgttgagcatcacatatgggttctttcagatctgaactgaaaagaccccagtgtctcgtgttccataggaggactgaattctcttcatttcggtcccctaaggacgggtaacaaggctgtggctgattgctgtagctgctagcatccttggtttgttaatcccctgtggtcctctcccttaagggccaggggcaaggtgaaacattgtcgcatcaaccgggacggacgccacttcgtgctgggcacctctgcctactttgagagcctggtggagcttgtcagctactacgagaagcacgcgctctatcgcaagatgaggcttcgataccccgtgaccccggagctcctggagcgatataatatggtaggttgacgcccttgggcttgttagtcatatcacggtctacattttagagatacaatgtgcatacatttacatatattactgtatgtctgcgataggaggtcctgaggatgcagacttggccaccgtttacaaagactctgtccccatgcgactgatagtggaggttgggagaggcaggcgatgcattagaaataaacacagacagagtcagatggtaatatatgtaaagagagagggctgggacggcgtagcagggtatgaagagatggggcagtggcttgcagttttcaaaggttctggggcgatcttcctgaggagtgagccatgcagatatctggaggagaaagaacagcagaagcaaaagccttggggtggtcaacaggcatgaaatgagcccagcgagagcaacgctgaatgatgaatgaggctggggctgagattccagaaggttcatgtagggcctggtgggccatgggaaggcactggctctttatctcgtacactgcagggtcctgagtgcacagaaggccggatatggtcatgatatctcacttcctgtcagaaggatccttgattttcctgagaggagacagattctgagggctggttagtgttgcttgtcaacttgacacagcctagaatcagcaggaagaagtcttagcgagaaacttcctagctcaggttggcccatgggcatgtctatgggaagctctctggattgttcattgatgtaggaaggcccagcccaccgtgggcagctccattccctaagcagtgagcccagaacagtatcagaaaggagaaagctggctgagatcaagtcagtgaggctacaggtgtttattttctctgtgctcttgactgtccctgccttgacttcctcatgacgatggactaccatccttttttctcttaagttgtctttggtcaggatattttatcacagccacagaaatgagactaggacctaggacccaggacccaatattccaaccatgtgccagggagtgtgtctaaattcttccttgagaaaatttgggtcctagaggagaaagcacagtgtgccagagtgaggtgtttgggtcagcactggctcctttggagcacactgaccttcatagcaagaggagaagacactacagtggacaggggagtggccaagagaggcgctttaacaggacaaaagtgtgagccaaaacctaggagacagaagtgaacgaataatgtctgaggagatgaggaaagactgacagcagtgactcggggtagagggacaggaaggctggggagggtcagggtaggccaggggccttggcagttgctgcatatgcctgccagtttccctggtatgattctcttgagctgcagatatgctatctttgaacagggtatcaagaagagatcctggcatcctctgggtagggatagggtatctatgatttccaggttgcttccaaatttgggggaactttttgaatcttcttgctagctctccctccgagccacacaagaatcccgtgaggttccaactcttctttttttttttttaaagatttatttatttatttatttatttatttattatttgttattatatgtatgtgagtaccctgtagctgtcttcagacaaaccagaagagggcatcggatcccattccagatggttgtgagctaccatatggttgctgggaattgaactcaggacctctggtagagcagtcagcgctcttaaccactaagccatctctccagccgcctccaactcttctttccaaagaacaagataccccgagaaagcctgcagcctggctgttgccacaggccattctaggagcctggggtgccgtacttacttcctgtttggttggtgctgggaatcgaaccgggggccttgcccatggcaggcaaacacttctttccctgagccacactcctcaagccctttccgtttactctttgtccttcctcttttttcaggaaagagacatcaactctctttatgacgtcagcaggatgtatgtggacccaagtgagatcaacccttccatggtacggcaccagtcctacccagtagagtgagagggagaccctgccccgccactggtctccaccacagttatagtggggagtattctgggacacctgaccacagctaacatttcatggtgaagggtaggacataccatgtggtttcacggaggttaatcgaattccatccagatggaactgagtctcgctagagtcccgagtttcggtgaaccacctttgggccacacagattctaattaaaaaaatcttccaaaaactcctttcctgcttgccgacggagcccgaggcgtttatgaattatgtctggttcgatgccctcctcgcgaggccagcgctatctcggattcccaccctgccgctgcctcgtaactttgtgtaggaaaaggtggattttgctttttgcctccagctgctccatctccatctcagacttagtgggggaagagctacagcggattttctgcctggtacacgtgactagggtgcggccactctctggtgggctctgctgagatcccggcctcaattcctttcctttttttttttttttaaaaacacatttccaatctttggtggatgcaacttcaaagcaggccatgaaggcttcagagtgaggaggtgaggagagagtggctaacttgtatgggcagcgtttcagagggaaggctgtgctgtgacgaggcccagcccggatggttaggtttgggacattttcccagcagcccccggaagaatattgagctgacctccatcctcctcccagagttacggactcagtttgctctgaagggcctgcgtctcttctccttttaaacacagttccatgagttaggtctactggctcacaagagcgtcaggcagatgacacgggagggtggagctgtaagtatgacatcacagccccacctcccagtaccggagatggaacccaggacctctcatatgccagggtgaggtgtatgcatagctgaggtgcatttccagtgcccccccccaatccccatcttgactttttcagggtgacctaggtaagttcacaggactggaaggatagcatttggggtaacatgtcaagtgtgttgaagacaagagtccagtatgactctaagcacttagccttggttagatcctaattcctcatgccagctacacaaagcaggtaccatcgtgtggtacccattttactggtgaggaaactgaggttattcaggtgactccaagcagctgggttggaagcctgtcctcttggccgtgtggatacgcccagttcctacaaggccacacagagattggctcgtttctcactagtccccttgggccttttttgctgtcccagaaaagcagtctcttccaaatactattcagtagaacctctttatgccatgcctgtgcctctctctcaccacgagcccggctctggctctcacatttagaatgccggggaataatcctgccagtctctggttggggttctacatggcagaagcttctagaagctgcattagtctttatagattctggtggaggatggcagtatctcgcagtcactgacccagttctgggctcagctacttctcatgtggttggctctggaccaggttcttcatgtctctgtgctcagctttcccatctgtaaaatgggcatgatggcaccacctccccgttagagtggttgtgacagttaagggagtcactgtaggttagaacagtaagttcagggcagctctccatgttggcagatgtctaagaaatgcagggcacaggcattttttactgtcacacgaattatttcactgatttttctcaggagatgcataaaactttaattaccatttcagctggggaaatggaggcttagcgggctcctgcttacacagataggagtgggcagagccgcggttacaacttctgggacggacttagtatctagtctcccagaagtgatctttcccgagtcctttctcctttgtcagggaagagaggaaagccaaagacctaagcaggcttgatcattttagagatttctctattagtatttctttgctgtgtgtgggtttatttttttctttctttgtgtgtttactattattgagtagcaggcttcaagaaaattctttgaaaatttcgcctccataaattccatcttttcttgctcatacagagcccagcttttgttgttattgttgtttgatttagggaggggtgtgagacattgagacagtctcactgtgtagctcaggcaggctttgaacttttgttcctccggccttagcagcaccccaaccaagctctggagttatgggtaggcaccactacatccaggtccctagcatgactagacgatagtgtctgaacttctgggagaaccattaagaactgcagctctgaggtggcgagtatggattaatctaagagattgtgtcgagagtttagtctttctcctggttgagctagtctttaacccacttcctggtggactgcatgtgtttggttcccatgcaataccaactctcaccagcagatggcgtagtaactccggcctctgccgtctctggcttcctaaagggtcctgcttccctctgctgcctctgtcatccaactgcccctcttttcttcctgttccccccccccaagcctcagaggaccgtgaaagcgctctatgactacaaagccaagcgcagcgacgagctgaccttctgccgcggtgccctcatccacaatgtctccaaggagcccgggggatggtaagcctgaccggggatgggcctcttgggggtgaacttgactggtctcctattgtggtgactctaaggggctgggtggcgctctgagccctcttgtctcacattccagactggatgggtgctgattcaccacggaggtcttcccaaggttgcatcgttactgtgcgggctctagcaatgacacaagcttgtttgtggttaaaaattaaaaacaaacaaactaaaaaaaaatatacacgtgtgcctatttgtctgaatatgcacacacatatatgcaggtacctaaagagtcccgacaagggcatcagaaccctgggaacgcagttacagatggttgtgagccaccatgtggatgctgggaactgaacctgggtcctctgaaacagaagcaaagagctttaaaccactgagccgtctctccagcctctcaagttcatttaaaaaaatcaggagacccccttgattccaaactggttttcacctaacccctcggcatcaaagccatacgacagcaggtgaggaacggcccccctcagtctttctgacgacgcctctgtcctcacagaggccgcctgccctcactgattggtgccctttgaccttctctcccagggcaggcgcttgacattaccgaggcctctcccactctgggcgtctcagctgcaggcgctccctcactgtcattttgccccttgatctagggaattcccaggcacagttggtgcccaggggaagagagtatgtgtagaaacccccgtgagaactcccaagtcacactgtttgtttgtttgttttttgcccggggaagactctgacatgtctcatgcctcccccgtggttctaatgtgaactttcctaaaattctaactcttgtttgagatgaactgagagacaagggtacagtcatctggcaaggggctgtgggtaaacggcagctgccacccatctctctctctctctgatggcaagcccgtcagtcacctgcttgtatcagatcctgctcccaaactactcagggacaaccaatggtttttgtcccggtagaaacacttttgagagtgaaagcaaggtggacattagtgattacatgtcagtaacaattatcaagttcttggtcctgaaatacaggtggcgcccatgcttatgatgattcatagaaaggaaggtggtgaggagggtgcagaaagggctggcacttggcagccgctatgtgcacagtatcacatatccttactctgcttgttcaggccaaagaagcaaattaggtgcttcctgctactgccgggtacggatttggttatgttgagaaagatctcaggccgtgtggaaggcaggcgtgtggttctaagttaggggtaaggtgtctgtttaaacagtggtgggcacaggggccagagaggcacagaggagcagctgccagggctctctggaggagaaggtaccgagtcaggtcttaggtagttaggaggcttagttagcaggttagtagcctgcttgtcgggcccagcagctaggcagtgcagcaggggcagttctgggtcgtggagcttccctgggctgagacccagttgggctatgacaggctcctgaggctggatcttgtgggatctggaatgctgcgacatggtgtggctggaggtacttttgaaataagccttctggtcacagaaagtggaccagtgagtggccttgaaagtatgagaccctgcaatcaggaatagactggaggtgtgtaagtgtccagcgtggccacagcacatccacaatgggttatgtcgaatgtggctggtgctgtaatgaggggctaggccagtgctctatggctgagcattccctcacccccactcagcctctcattggcagagtctgggcaagtgcctacactgagctgcatactgagccaaggatggacattgtcatacctgggatggatgccggatgccacttgaagcacttggtaaacccagactgttctaataaaacccaaggcagctccagcattgccccaatttacagatggggagcctatggtacagagcaccagtgtagtcactgaaggagatggaatttcttttagaaaagtatttggttttattactttaaaattacgagtcaacataggcctgtgtgtgtgtgtgtgtgtgtgtgtgtgtgtgtgcctgccttagagtgtagtgcccacagaggccagaagagggcagaagatcccctggagctggagttagagctacttggtatggatgctgaaccatctcttcagctctaaggagctaagatttcactgcaggccatttggccccacacactcttgtgtctggattcacagccttcccacaaatggcgtgggcgctctctgagaggccgttggtccctcttaaagccctggaagctttgacatctcttagtgttgccaacaccagaatttagtcatgaggaacgagttcttagtcatctgacaataagtatttttaaaaggcgtatgctccccttgaaatgctgtcatcatagatcatgacagcccctcgggtcacctgagcactcagagctgagcaggctaagccctccatggctgtggttctccacaggtggaaaggggactacgggacccggatccagcagtacttcccgtccaactatgtcgaggatatctcggcaggcgatgctgaggagatggaaaagcaggtgggtctccgtagtctgtggtgaaggctttgggggagtcccttgagctatcttggggtgggggtgggggtgggggatgactttaacatatacttggtgggggggggaaggtctctgcagagctgggcagtggagcgggcagggtgatgcagaaattgggaccagccctgagctgctgcgggtaaaagcctccgtgacgagccggttgtgttttaatcaggcagcgcggggctaagattttgaaagctcaggagaattcccactggagtgagagtggccagacggggaatttgtcctctgctcaaagcaatgtgcaaatgaaacacattcggtttagagaggcagacatgcagaacgtgcttagcatgaggaaggggcagtgctttgctggaaggtgagacagggccttctggtgactttgcctgtgagccaggctttggtccccagccaccttgtattagagtgctcttggtggaagaaaggggccacttgggctcatcagcttgccccagggaagaatctgtagtgtgggcgcgcatccctttagggtccgcagcgtttattccctaagggtggcaacacaattggggaagggctttctggaggaagcagtgtttgagtcttaaaagtgaagctgggttaattaccaagagatgggcacaggaaggcacagcctaagtcagggtgcggtgagtggaagacagttgtccccaggtggctgggacagggacaggactcctcactgcatctgtgtgtcaccggaagcctggcagagaaggctggggcagtatagcaataatatcagctttgccttctcagttggttctcaggacggacggttcgagtgtgcagcacagaggggataaaggccggcgaggttggccagggcttggaaagccacagaagccagatggcagatcccagctgtagctttccgtgggacgtggggggagccgcagaagttctcctgagctgcaggagtcgaaggccaagtggcctcgtttcatatgcacagcagatggggcttgagattggttttaggactcacaaggtgtgtctctgtggactggaaaaacgcaacacagatactgtaggtatctgtgcactgctgggtctccgtcatcgccctccccatggactctgtaatgaaaacgcattttaagccacgccacaggtagtggcggcgtggcgctaaacggcatgtctagaaactggttgtcgttttattattttgcttatgactactgagaatcgggtctcatttcttcacagattattgaagacaatcccctcgggtctctctgcaaaggcatattggatcttaatacctacaacgttggtatgtgcacttgttttcttagcttgattccaggccagatccaccccgccctaccaaggctggcttaaggactagcctcagcagggaggcgggctggcgcatgtcttgtgcctaccagacctggatgaggtggggctgaagcatgcatggggactgataggtccctgatggtggggcctgctgccaccatctgctaacacaggactgccctctaagaagtactggtgacttggctgttgtcatggtgtcaacatctgcccatgtgtctgctttacagagagctgagctgctgattggtcagggttgggtacgtcagccgctaaagctcccgaggctcttgcctggctcttctcactagatcttagctcccgcaagaaacctgtcctgccctggttagcatgtgtggtaacagggacgtggcggggcattctgtgtatagatgagccgtgatttgcacgcagctctgtgttcagggcctgcccacactgatgtgggtgcacggtagcttccagggatgtagcttcctatttgtagctgcaggtccaagcacagagcccaagctccctccacggtggcccactgattcttgagctgagtcccctctttcccggggaggtccgagcatggtccccttgggttcctatgacaacaatcccaggaccgatactcctgcccttttatacaaccattactttctttccatccttattctcttctcccttttcccttcctgtgactctggtagggaaggtggaggggttttgctccagatgagaaaatgggtaagtctctggcaactccccgatgtgccaggactgtcagactcaattctcacctttgtagctgatgccctggcttgccccctccctgtattgtcctgttagaggacatggggatgtcgctcactcagcagtagggacttgtcatcagggtggagctgtccttcagctctgcccgtgtgacttcgcacatgttgctgtcaccttgagcctctcggtcttgtctcctataggatgagtgtcacagtgtccccgtgaggtttgctaaaagctaaaaccacacgtgtagtcgtctgctggggacgtcacctcagagctcagaaagtgcagacaccagtacggggcagatcagggtaaccttcatgttcctatctatagttatcttttttccttgtcatctgtcagtcagccttagtgtgccacagcgttcctgactttccttcatcctcatagggttgctttctgggtctgggttcccacaccccattgtctttctcttctagggatgttgttccttggatttaaggttgatcttatgtctggcacatcttttttttttttttttttaagatttatttatttattatatgtacactgtagctgtcttcagacacaccagaagaggtcatcgaatcccattacaggtggttgtgagccaccatgtggttgctgggatttgaactcaggacctttagaagagcagtcagtgctcttaaccactgagccatctctccagcccaggtctggcacaacttgagatagttggtacatctacaaaaattccatttctaaataatgttacactcgcagggacaggagcttgataattctttttggaggataatactcagcccggtacacacctttaccagtaacttgtacaaaaggttcaagacactgcctgcaagaaggtgggagtccccatcagcatgtgactatagctgtggcagttgaggtgggggcactagtatgaggtgcggtcttggtggtcacctcctgggcccatcaggactttccttaccctctgtctacagtgaaggccccccaggggaaaaaccagaaagccttcgtctttatcctggagcctaagaaacagggagatcctcccgtggagttcgcgaccgaccgtgtggaggagctgtttgagtggtttcagagcatacgggagatcacttggaagatggacaccaaggtgggtctaagcacactggggagcgaggtacctacccatcccagcccattctgccctggtgaggccagggatgggttcagaggccattgctgtgtttcaaagggaccctgaattctaaactccggggctgggtacaggcatcagctgtaatctggtggccagtggtgccagagttctaacgtggggcaggaagggtaagagaggggacttcagtgtggggagcgggtgtggcggcagtcccaaaggcgccagggactgcagctaagtcatatgacttgcacctgacttcctcatataaaccacaaacatcttgagtgctgcgcaggtgtaccaggatacaggtgaatccaatttggtggagatttgcccctgctgccctgattagctgaagctgcatgcctggtgaggtggcgtggcctgctgtgcgtggatgggaactgagagtataaaagagtgagaggcccagggttcgagggagatataaacaagggagatatagagaaaaaaagaaacaggactgaataaaggtgtgcagaaggatcctgtagcagcgtcgttcttcctggccagttgagcgcgcgcaacacttcaggccaggccaccagctaacaaatctggtcttgacattgtctggctacatggctcagagctggaggcaattctgtctcttgggatgtatggaccaatctagacaacatctctaaagagctcagcgtaggatgctggaagccagtgagctcctagatgctgacgctcttgtaaaagcattctgtcagccattgccccggccaacgaaaggctgaagagtctggagcagtgcgagagggtagctctgtgtgcgagaatgagaagttaacccttacccgatagcactgtacagtgcgtgtgtggagcggagtcctccctccccaggtccatgtgtgtggcctgagccatgctaaggagacagctgtctgtactgggctgtgctgggggagctaggagaagggggaggctgcataggtttcaaaggtagagagaaaagagatgatgtttcttggggtccacagaggtttagagtactgagtcctgtggaccaccccaaccagtgtggctttagggagggggtcagacaggaggcaggggcataatgggatgacagaagctccctcttctgctatcagggtctccacctacttcagattgaccttgaaccttcaaattctcctgcctcagccagccaagcactgggattaaagtcatgttcttctgcttgtggctctccatttaccatttattatctctgtgtgtgtgtgtgtgtgtgtgtgtgtgtgtgtgtgcacatgcgtgtgtgcatgcatggaggccagaggagggtgttagataccatcttttatctctcttccccttattcctttgaggcagggtgtctccctcaacctagaccttagtttgtggggtcacgctggcaacagaaagccgcagccacccccctgcctcttccccactgctgtgttggagtggcaggtatgaaagaccacacctggctttatcatgtgggtgctgggagctgaactcaggttctcttggtgagccgtgctaaccactgggacgtccccccagttcacgcccgtgtgactttagagagcagcagcggcagagccatcctagactccgagccccgggtgggaacagcatggtggagaatctaaagagggtagaagagaggggagattgtcttcaggacagaaaaacacccaaccctgggtgctgggggatctgggtggaaagctggccaggtgagtggagtgtgccatggtgtagatgctggctcggtactgtagtgtgttcagggagagctggccaggtgagccagagtgtgccaaggtgcagacgctggctcagtgctgtatcgggttcatctctacaggagaacaacatgaagtactgggagaggaaccagtccatcgccattgagctctcggacttggttgtatactgcaagccaactagcaaaaccaaggaccatttgggtgagtctcctggggaagacccttcccagcgaactctgctgtttgccggtgaggcgggtactctcaggatactacatagaacatgcactttgcttcctaacggatccaggcagcagccctgtccatgttcccatagccaagatgtgttggtggttctaaataagacgtgaaattctgttatgcctagaaagaaaggctgtggggagaatcgggtccctttggactgcacaagaccctctttgtaatgctggacactgccaagggcaagaggtaccaattaaggtgtgtaaggtgtgactgtcatgccccttaggtatctttgtgtatgtgtgtggtagttactccccgcacagtcaggccaataggccaacctgatccagacagttcctcactgagactctctggctgcgtgactttaggtcatgtcaagttggcgagaaacacccatcatggtgagtgttggtgcatcttggctgtggttcctcagctgtccatcgtgtttgagagaggctctgtcactgggcttggattcagcaagcaggctaggctggctgaccagcgagctctggggatcctcctgcaagcctgcatactgagattacacagtaccatacctggctctcttctcttctcttctcttctcttctcttctcttctcttctcttctcttctcttctcttctcctttcctatcctttcttttctttttttctttctttcgtctttctttctttctttctttcttttttataacttgtggactcgaactcaggtttacatagttggcactttacagagttggccaccaccctatcccttcagtgtcttttctttttaaagatttattcattattatacataagtacattgtagctgacttctgacacaccagaagagggcatcagatctcattacagatggttatgagccaccatgtggttgctgggatttgaactcaggacctttggaagagcagtcagtgttcttacctgctgagccatcttgccaaccctcatggccttttcaagagagttctggtctctttttgtcacctgggccttctgccatcacatccagaagtatggttgactgtctcctctgtcttagtcagtgctctattgctttgaagagacataaccatgcaactcttacagagtaaaacatctaattggagacttgcttacaggttcagcggtttagtccattgtaatcagggtgggaagcatgcaggcagacttggtgttaaagaggtgcctgagaggtctacatctgcatcctcaggtagcaggaggacagagagagctatggggtcacgcttgggcccttgaaacctcaaagctcatccctgtgacatacttcctccaacaaggtcacacctactccaatgaggccacatctctgaatagtgcccctccctggtgaccaagtatttaaatctttgagcctataggagctgttcttattcaaaggatcatatcctctctgcagaaaatcccgacttccgagaaatccgctcttttgtggagacgaaggcagacagcattgtcaggcaaaaacctgtcgatctattgcgatacaatcagaagggcctgacccgagtctaccccaagggacagagagttgactcttcgaactatgaccccttccgtctgtggctgtgcggctcccagatggtggcactcaatttccagactccaggtaagggatgaaggcagccagtctgtccaggctaggtggtggccctgtcatggccagcaatgtcacttgggcagctagtgggatgtgattgtttctgaacaagtgactgggctggcccgtcaaggttgaacttggatgctggttagtacaaggccctagggactgacaaaggggacagtggacatatggctgaagcaggctcggtgaccacgagtgacagagaggtattatgaccattctggtttaggaagggaatgtaataacttattgaactagtaagtgttgtttttaaaacaacatcccaaacatctgatttaccaaatgaagactcaggagcaagatgctggggtgaaagcatcttgctagctcagagaggcagagagagcacccagctgactgatgccccagaaggaaaaggctccttctccatgttgtcttaaacacccttcaactcacagaccctcttctccttctcctggcttctcttatgttcactccctgtcaactggttgcttgctttgcctcttgacctatggttgatttaatttaatcctctttacacaaagctcttgggtcaaaggtgtgcgctagggctgagccacaccacaacaagaaaaggtttttccagttgacaatctcggggcttacagtgtgatcaaatatcctgcaacaggtaggtaagtctcagagggactgatggatccaggtgtgactggatccaagctctcagtggctgccttacctctttgtgcgctttctctccaagggcttcatgcctaccctctctagactcttatatagttgggaaaacccacgcacacaaattttagacgttgcatcctgtgaattcgtttgttcgtttctcttatttatttaacaactacacccacctcagctctaggaatctgtaggtcaggtcccatccctgtctaccgcagatgccactgcctcctggacccgtggctcttgttcccaagagtgggtgcacagtgtggggcagacatttcttactgctgaggaatcctccccctagccaacccccggaccactgggcacctgtgtcctgaggcacttgcccagttcctcctctagagcatgggcacactccttcagcataggtcactactgtagtttcacgaagctcacctgctcttggctcctcagggagaaaactgacttgtccttacaatttctgctcaaggctctgctctttgagtaacattaactctttcccctctcaccaagtcaagggatgtttgccatttgtttccctgcaaagcggtgggtcctcttggtatcccaccaagctggctttttattgatagtgctaactatctacctgttgtgtgaactgagattatgtgtgggtgtgcttgccatggtccacacgtgatggtcagaggacagggcatgcgtgccatgaaacatgcgtggaggtcagaggaatagggcatacatagattgcacacgtgtgtggaggttggaggacagggtgcttatgccatggtccacacttgaaggccagaggaacagggtgtctatgtcatggaacacacgtggaggtctgaggacagctggtagagtctttccttctatctttatgtgattctggaggccacactcaggtcggtggctttatctacttgccgagtcacctgtcccttgaaccctgtgatttaccctgtggtgtaagcaagcgttctacccctggcctgcacccagtttcagtagattctaattccttaaggcttacacctctccagactccctgtaagatggtttcctggtgcgggattctttcctaacgctccccatgtttccctggagtcagatgtcttttctgaaccgcttcccccccccccccccagtcagtgcaggaaggtcacgtggcctgtgcccatgtgcgcccggagctggtgttccctggctgcccccacagcgcccttcggctctcttttcagacaaatacatgcagatgaaccacgcgctgttttcgctcaatgggcgaacaggctacgtcctgcagcctgagagcatgcgctctgagaagtatgatccgatgcccctggagtcccagaggaagatcctgatgacactcactgtcaaggtagagggggctccctggggggcgctcttgtcctgttaatccagcaccatctcaactgcaacctcatgtggttcacctggggtcattctgggctgaaaacccttcctgtcacttgccctagtctgggtgtgacgtatgctcttggggttcatgtgaggtcaacctctagccgagaggagagttcatttctcctttgtcttagagaggtcacagcttactctttctctctgtctgtctctccctttgtttctccctctctgtctcttgtttctctctctctctctctctctctctctctctctctctctctctcccttccttccttttttccttcttgtttttttttttttttttttttgagacagggtttctctgtatagccctggccattgtggaacttgctatgtagatgaggctggcctcaaactcagagatctgcctacctctgcctcctgagtgctgggactaagggtgtgcgccactactgtctagcatgagttttcttaaattcatcccgtccttggcattttaggcagatatgagagaaagtgttcctaagatccaggaagttaaaatgaaatgagctgggaggtagcttagcttttggagtgtttatccagtgtgcatgaagccaccgggagcaccatggagacaagaggcaggaggattgtcatcagggtaaggccagctttgtttacatagcaagtttgaagtcagcttaggataaatgagacctcattttagaaaagtaagacaaagtatttgaaggtgtttagtaaataagggtcagttataaacagaccaccctaccgtcttctgtctgggaaatccagtatgaaggtcccatgaacctgtactcaggtgagactctactggtgagtcacatggcccgggaacccactatgtctttttatcatcaaagagtgatggtgggctgggtcagcatccatgcctctgagagcagtggtgacttctccactgaataagggtagctttgaacttgtacagtcagactttagggtcccgaaaaaaatccacaaagcactactctgtggtccaaattccaccctcccagcgcagacccgggagacttccaacccttgccttctgtgtcccaggttcttggtgcacgccacctccctaaactagggcggagtattgcctgtccttttgtggaggtggaaatctgcggggctgagtatgacagcaacaaattcaagacgacggttgtgagtaagtagcgggtgatccctgtttgtgtgggtgtgtccaggcagtgcagaggctggaggtgtcttcctcagtcgttcccactttaggttttgagactagtgtcttctctctgtgaacctgaaccttctccgttcaggtactcgggctggccaggggggctgcagtgatctgccagtgtttcccactgccttacatatatgtgcttggttttacatggatgctggggtctacccttgggttgtcctgtttcctacagcgggcacttgacttaagcacctctgcagccctgttagtctttctttttttaaaggtgaagggagcagaccgatacgtgggttatggctccttggtgatttttataatgtacttttgctgtggtgtgttttcctttccgagctccagcctgtggttggggaaacagagccacctgcccagggaacaacttaggtgcagaccaagtcagctggccttctctatagggtggcaggtttgctgtgtgtcttgccttacaagggtggttctccacgagaactcccaacaggcttcagagacacccccccccccatcccactttccttctcaggccaaggggtccatcagctcacacgtgttctgctcacctcttttcttggtcctctcccccttgagttccactctacagttctctgcttcccttcacctatcccaggaggagagatgggtgaggtctcctgttggctctggtcctggaaggctggcctgcagcaggattgcctgctgcaaaagaaataaccaaagcttattattattattattcagggattcttagacctgggcatagatgcagatgcgtatgcaagtttgtggagaggttcaagctgaggctgaagagactggcttatgaggaggcagggcacaagttgcagtaagcacaagctttggtctctttctagatgacaatggcctcagccctgtctgggctccaactcaggagaaggtgacatttgagatctatgatccaaaccttgccttcctacgctttgtggtctacgaagaagacatgttcagtgatcccaacttcctggctcatgccacgtaccccattaaaggcatcaaatccggtaaggagcgttggcaaggatgttcagtttgggggagcccagttctttggtctgtgctgctggctgtaaaaggaacacaccaacatctttcctggtttagagtaagtcacaacaaagccattcagaagggtactaagcacaggggcgggaggggggggtggagaaaggccgaatcctttcaactttggcctctttgaggaaaccatcaatgttagactatcttcaacctggcgctgtttgctttcattttgagatgcctcgggcattttatcttcattagtagatggagaaatatgttctaatatgagcaagccatgcatgcccttggcctgtgtcatcaggacgaggccctaagcatccatggggtccaagtttcctaagcatcccaaacttactgtctcgcactagacttggaggctgacttgcttgctaggtttatttttatgctgaacacaatacaaccccctctgccattaagccaaagtgggtcacgtatgaacccgttaatttgggcatctctcagcacccccccccccatcacagaagcttcttgtcacaggagatgataataaatacagagagaagaagaccatggagatcttagatctagatatatcacctccctccccaaaagttcagggagcattgaggaagacagaacagaaaggtcaccagagctacagaggtacacacagcataagaccagtacaagaacaagccagtccaaaccacagcccagataaggggagggctcatgaagcctcactccacgatgaggagctgttagcaaccgatggctattgggagaaggagcaccccatcttcttcaggaatttagcccctgggaggatacccagctccaggagatggccccacatttacacctgtccttgggaggggaaaacagtgatgaagaactaggggatagatttgaccaaagcacactatatgcagatatgaaattcccaaacaaacaaacaaacccatgaaacaacaaaacccactctattgaatttttccagggcagctaagacagtgtcttgtgagacctggggtttctctgaaggtggctgtcttagtgagggttttactgctgtgagcagacaccatgaccgaggcaactcttataaggacaacatttaattgtggctggcttatgggttcagaggttcagcccattatcatcaaggtgggagcatggcagcatccaggcaggcatggtgcaggaggagctgagagttctacatcttcatctgaaggctgctagcagaagactaacttccaggcagctaggataagggtcttaaagcctacacccacagtgacacacccaccccaacagggccacaggttctaatagggctactccctgggccgagcatagacagtgactattcttatgtgggatggtttctctcaggaccttcctccccggatttcacatgtaacccaacacgcagaccagctatgtggtggatttcttcctcatccacggcattgccagttcatgaggcagacaccgtagatccttctgaattccccaggaggtcactgttcccttgtttcccagagcagtcatttttcaagagaaagaaattactatcattttttgtcatttatgtcaaattaccatcttttgatgtttggaagcctaggctctattcagtgctgagctgggtcttttgaaaacttggaccacgccaccccttctttcatgaagtctctcagcttctgtagccatttttcccactccctgctagatgcatttccaaccagcagatgccttaggggctcctgtttgaaaatgctgatttctgggtccaccttgggatgctccgattcagcccagggtggcgctcgggaatcagcctgtattatggccagctccctgggaggacctgggcagtactgagctaaagaggctagtccccagctgccagtcttactgctgagggcccagacactagaggaagagtctgggaaaatgtataaagcctcagatttctatttagcaatttagaaatcacatttgagcatgtcagacaacaacaacaagcactccttgatggttaacatatatgacaggtgactttaaagtcagcacctgagcggctggacgctgatttgctatgtgcttcttcagattagcccagcaatcagggttcagaggcgatgctgcctcttcacatcaagaaaagtgaatctttgccgttctggtcttaatgacctcatggcattaaggaaccagggccagctcgtttctggaccaccttgtcccgcccctggccctatcatcctttgggagatggggaggtgaccctcaggatgcagtcagagctcatggtacactgactttccttactgggagggaaacaattcccctaagatgaattcgcttggagactgagaagaaaaacccagcaaggaaacatggaggtggattaataatgggagcctcctccccgttctaaccaggagataatcacagcacggctcttctccctcgccttgcaggctcccggcatatctatattcatgagaggcaggaaataaaatgaatagtccttttgtgcagatggctcccagggccgtctaaactcgaaaataaactttgcccattgttagggtggctgcacttaagccttcaaaccggctgggcccgactcaggagggagacaaacttacagtactcagctaccttaatttccttttctttaatccttacaataatcctgtgagctagcannnnnnnnnnnnnnnnnnnnctacaataatcctgtgagctagcactctctctctctctccctccctccctccctccctccctccctccctgcagatgtgaattcactcattcaaggtcacaggctggcacttgcccccttgtttttccttctctgtagactgtccttgagggacctcttctttcaagtgggcacttaaagccccagggcaggccttccttcacttcctttctccacgtgaaataaacaaaactaaaaataatacaattttcatggttggtgaaactgagaaatagcttggctttagtccactagtggcttcccagagttgggcagtaagtggaaatatgagggactccggccagagcccattcttcctagctcaagaggcacacaccctcagtcattcttgccctaaagctggagtttatagctgcctagcattgtcctgggccacccctgaataccccaaggtctagtttattctcccaatccatcaacactaaactctcctcaggtcggccattaagatgcacagaatctgtgtcttaacagggttcacaaggggttagagcacagaatctgcatttgcatcttaatggaagtcacaaactacattaatctagaccagtattatgcggatatctacagacagtctgtgattatcaacccacacagaagctagagcagccaacataccaaacactgcctaaagtctcatcagtcatcaggtgggaataggttagacaatttcagcacagcagtatttaatgaactcagaatgccccccaaatgctatggggtgtgtgtgggggatgtggcctgagagttttatacctatctcaactatcacacatctataaactcaaatccacttaaaatgcacaattggggattctgtgtcacatgagcacaagagaacaaagccaggtagctaagacatgcacaaggaagttaagtaaaaaaaagactgggagaattgagcaatttaacagtatgtttgtttgagttgggcagtggtggtgcatgcctttaatcccagcacttgggaaactgagtttgaggccagcctgctctacatactgagttccaggacagccagagccaatatacagagaaaccctgacttgatacaacaacaacaaaaagccaaatcaacaatgaaaaatatacccaagcctttctttgtggagaataatggttgtaataatggcttatttccaagacgccctgaaacagggagttgttactttatcgctcaataaaacttttcttgctcatgctctaaaaaaagtcaacaggatgcaaatgttctatacattggtatagaaacaattacaccttaaaaatatccaaaattgggaggggaaaaaaagaaggaaggctcagggttgggtggctatgtccttttccttatcctaagcagtagcagcagcagaggagagattcaataggtattgtgtaaaggtgggaagctggggctggtgagatggctcagcagggaaaggtgcttgtggccaagcctgacagcctaggttcaatcctcacatggtggaaggagagaacacgctacatacactacacataaacaaatgttaattataaaggtgataggataatagatagtgtagatattccctaagagtatgggccaacacagggatgaaggatggtgtaaggaaatggggtgtgtctaatctgtgcagctcagcagataccatataaataaaaagctctgggaacaaatcagccattagaagggatggctaagatggaaggttgtatgaaagctacgagggaccatgcactgatctgtgctttttatttttttaaaaaaataaacctattgtaaaaattcaaataaacattacacactgaaacagacctcttaagtctctatatcaataagcttttatacagttagagcagccattctgtagctgcagcttctcactggatcttacacttgcactattcagtgtttttatgcacttctccgctgcccaaaccaaaaaattcaaaggacgtaattagaactagaaaacccattagctttatattgtctttcgtaagttgtgtctgttacctgcagccagtccttgttaattgcctattatttagcctttcttgctgtctttcctcagtgatatatcgtatccacacatgtccatttgtttacatgtatatgtctattattggctagggatctatgcaaaaagaaacactaacatctgcttagagaggaaaggcccttcacagtgctgtgctgtaggctagggagcaggtagcctgttttctatggattcctttagacaagccaacccatcagctgttgagatggagccctgcaactgctgtttaacagggctgggggtgcggatctgctcaagctcatcctgcgccaatcctcaataaaaagacacatttcaaggtccgctgcacgtggaccctgattgtaagtaggaagtgggctccagagagattgatcaatgcagccatagacagccatagactgccaaggggtagtcaaataggaaatcattgaagataaaggcgactccctagccctgtgctttgggaaggcccaagagaaggcagtgggttgaagactcattaccgttctgactcttttgactttatgagtacttaaggaattaaaccacaatagtatcaatcactctaatttcaatggggaggggtaagtctgtagattctcacttctttctaaaattgcatttatcagttgtgcctttgtaagtacgtgtgtggagagttgtatctctcctttcctatgggacccggggtgtcaggcattgcagcgggcacctttacctgacgagccgtcttgtcagcccagttttgatttcttttgagccaaccatttctagttggcagatgttttaactttactatgtggatgtgttcatcaagaacactagtctctctctgtaactttaggacagaaacttgggcatggcacactggcctctctacccttagaatggggatgccatctccaggatatcacaagaaagcccagagctgatgctgatggcctgccattggctcttctccttctgtttctgctccagggtttagatcagtccctctgaagaatgggtacagtgaagacatcgagctggcatccctcctggttttctgtgagatgaggccagtcctggtgagtcatgggccctgaccagttggccaggggtgggaatataatggaaataaatactctggattaatgagctgaaacccttcccaggaccagtcaagggtctgggtttttcccctcagcatcctttcttgaggattgctgaaggattctggagtgggctgtacagtctgcggggagaggtcttgggaaggagttcttcctggttacttggcgccaacagcctgggcagatgatgcttttccaggcaagctcctcctttctggatgtgtttctcacctgttggccttgggtcattgcttcaaagggtctgtgtgggggaaggctggactctgattcccatgggctggtgactctctgcactggagggacctttgttctagtcctgtttgtctgtgtcttgaagagttctcgtttctcctttgactaaccagcttggttgtgcgttgaagtcactttgtcaccgtgacccacacaagaagcaccatcagggaggagagattgtttggctcacagtttgatgtgagacagtccactttggtgagggaagtatggtgacggtggcactgtggtgggggagtttggacagcttcttgcagaggaatcaggaagcaaagactgcataggaagtgggactgggctaaaaacttcaatgctcaccattgccatcagtgagtgactctcttcttccacagcttcaacaccacaaggtggggaccatatttaaacaaacacatgtctgtgtgaggtcattttgcattcaaatggtaacatgtaaatgtggtgggaagatcttggcttcactgaaagacaccaaagagtgccatggacttagactaggctctcatagctggtaacctgtgtagcaagttttttttttttttgtctcatttttctttcttttattgaaattagatttttttatacaatatattctgatcatggttccccttcctcaactcctctgacattcccctatcatcccccccatcagaatccacacccgttccattcattaggatacaagtagacatctaaaggatgataacaaaacaaaagcaaaccagaacaggataaaacaaagaaactgaagaaaaatagccaaaggaaaaagaaaaaagcacatgatatacatgtaggcacagagatacacatatttgtatgcacaggaattccctaaaaccacagaactggaagatatctatctatctatgcatatatacatatatgtgtgtgtgtatatatatatatatatatatatatatatatatatgtatgtatacacatatatacatatacacacacatattatatatatgcaaaggatccacgtaaggttaaaaaattttccctgtcaaaagcgtatgagacaaaggaccttcaaggatgtcactgatttcttctgtgttggctaactactgctggacctggggctaacccttaagagtggtttgtatcctcagtgagacaactggagatagctgctgggtccacttctatctgagctgggacttgatctggtgcagacccgtgcgggccctgtgcacactgccatggtctccatgagttcatatgtggtcctgttgtgtttagaaggccttgtttcctcagagcccaccatcctaactgggtcttacaagctttccacttcttctcccacggtcttccctgaaccccgaagggaaggatggtgaagacatcccgtttaggactgggtgtcccaaggtctctcaccctctgaacattgtctagctgcagctccttctctgttgttgttatcatttgctgaaggaggaagtggagtaacaaatactaagagtcccaattcgggcgtttcttccctactttagaccacttatgttcccagatgaaagacacacacaacctctatatttttaaatagccttaggcagcacaataactgggcagctgcttaccctccatgtcattagaatctactttcttattgataactccaagttatcactatttactatatatttcatctaggttgctcttaacccaagagaacccacttctcttggcccttagcctatggcagctctcctcctccctcctgtatgttctttttcttccatggtgacttattcctgcctttcctcctctttgtggttcccctgtccccaagcccttgaaacctcaaccccaccaatggctcttctgcccaactattggctgtcggcatctttattcaccaatcagaattaacttggggcttcgtgcagactccaggtcttgggggcctacacttagcatcacaatagacagtaatagagaaaacctcaccaggaagcttctttgaggatggctgagcaaaacctgatctgtaaatatagcagaatgtcattaggagctatttatgactacattcctcctgtagtatctggtttcccccgagatccctggcctatctgctctccagtttttggctacccaagcagtgttgggatcatggagtgaaccttaactcaaatcagatattggttggttgcactcataagcgttgtgccactattacacaagagcatcttgcaggttggtcatcattatagacagaagactttgtagctgggctggtgtttactcttctcctttggcagcacgcagagggcttcaagtatcatgaacactagtccataggagttaaggctctaggtaggcaccggctccacttgtctgtgttcaatgggctgtataggtgtaattttcagcgatagagccgtcacatcagtttgtggagaacaattagtagccttggcactagccctcattgttcctatggggtatttttggccaacttttcaattagatgtgacccgttcttggcactcactggaagcatcatttggtgatgagagatgtccagatgggcctccatcttccacatcatttggcaacttcattcagattgacttcatatatatatatgtatatatatatttcacatatatattcacatatattcatgtatattcatatatattcatatattcacatatatatatattaggaaacttctattgtagttaactatataactatataacaccccttccatggcccttagtttcagccctcctcatattccctctgtcacctccttccctcccatctccatttgtccgtcctgctcctgccctccctctgtaactatatattctattcccccttctagggcgatccatatctccccactcccaccccctttccctctatgtaacctctgtggttatacatattataacttatcgaagacttaatagctaacaccacatataatacatatcctatttgtccgagtgtaaacctcactcaagatgatttttttctagctccatccatttacctgccaatttcaccattcatttttttaaatggctgagtaatattgcattgtgcaaatgtaatacattatccattcacccgttgatggacatttaggctgttttcaatttctgtctattatgaagcagcaatgaacacgattgtgcaagtgctcttattgcaatgcctggcatgcagataattcatttttccatgacccttcattcttctaccaaaacctcagaaagcttgccacgagtcagggaattttattaccccccccccactcatttcccattgggaaacctaagccaattgtggcccccagtgtgctgccatatgatgatcttgctattggacctcattgtgttttctggtaggggaactgttggcctgtggtcttctttgggctgtaagaattaacatgttggcagtttcttgattgtcagttcctggaacatagctgagagctttccaatggggcaggagtggcaggactgggagacgccttttacagccattgtggtaatccagggagtgaaaattgctgcatttatagccaggcatggtggcacataccttcaactctagcactcaggaggcaggggctagcacatgtctgtgaattccaggccagtctggtctatatagccagtttcagaccagccagggctctaatgaatgaatgaatgaatgaatctatcctgaacttgactgagagtaacttggcttcctagtatgatggtttctcaagcactcacaaaacatcagggttaaagaggacataaaaatataggaagcaaggcaggaggcagagagtaacagacggtaggtggtcaacgacccagtcagccaagggtaccaccaccctctaatgtaagatagcctcaggatgaggaaattctatctgaaggggatagataatagaatagtttccatcttgaaaataattttaaatgttaagctaaaaaatacagttttcacttgacccttcagtggagaccccctccagccaattccatgttccttctgtggtagaaagacccggacaggaaccttttttgtaaagttccctcctatactgtggctgagtgagcaaaatgcttaagtcctcatgggtcttaaagcactcctcttcagaatgaattatgtacaagccaacatatcacaaataagaccaagatgcttagagagtatattccttatggtatgatggcttaccaatcccaccccccacccccgttagtctggggcaatggatcccctggtaacatgcccatgggcaggaggacctgagctttgacccttgacacgctcataaaagccaggcagcagcagtgcttatctgtaatggcatcgcagaggtgcagagcagaggactcctggggcctgcgggccaggctagccagtcagtaaaatccaggtgtgtgagagaccctgtcttaaacacaaagtacaatgtgatggagggagacatccagtattggcccctggcttccacacatacatgtacatacacagaaatatacaaatgtgcatgcatgtacacacacacacacacacacacacacacacacacacacacacactcctcagtacagatcacacatatagagagaaaagaaatcagtattgagttcgttcacttccctttctcctagggtgcctctgcctctgcctctgcattaatttcacacccacccccccgacccccagactttggtattgttcagctttggcaccaagatattctttgtaagatgttcagtagcatctgtgccttttgtccactagatggcggcagctcccacctcacacaatggttactaactctcctggcactgtcacacctccctccggtggccatatccttctttgagaaccactgctctcaaatgagattctaagcaccttcctattccattctgccattaagtagattggccatgagctcagtattcctccaatacttagatgggacccatttacccctccggctctcaggcccgtctcccttatgtctgaattattcgcttgggctccattcccagatgcggaatgagtggggctggataactgagcagggttggtagaaccgcaaacctaaaccttgaagacaaggaagctagaagaggctttgccaagtcagactccctgcctctcagctccccccgcccccgccccccccgccccgtcagcgcttgggcttctttctctgtggcctggggggggggcggggggaggagaagcttgcagccccccctctgtgcccataaagtccatctgcaggcagttcacaggaaaaccagtcagcacttgcggctgcggaaggcagtccgagaacacttagggaagctgtcgcaaatgccccccaaaaccgtgatcaatacattattaggaatcactgatagcagaagaagtgaatgtatttcaaagagaactgcgctcagctatgcttggctgccttgttgagggatgccctggtatgttgggggacccatgttgggggaccccactgttgaacgagggaggctgggagtgggaggaggttttgaatggataacgtcccctcctgcggatctgctctttaagaggaagcctctgaatgtgtgcaagtgtcattttggcggctggctcctgagcctgtatttactcgtacatctgtcacctggttctgtaccatctccagctgccagttggcatttccatccatgccgggatgaagcctctctcagaggctgtgcaggccacacgtgcaatatgttaggcttcccccttgatgtctagggggtccagccctgctggatgtcactgtgacctccggatgcgagagccatcaagactttcccaaacaagggattgatccccagagagccctgatggagttttttcatgaagtgtttgttgaaataaagcttaaagctgtggaagtctatcaataaagaattcaaatctcttccgaggtggccatttacactacacagatactctaagaacccttggttctttactgtgtttgctgaatgtatgtttttaaggagtgttttagcattatgatattacgtgttatatttaatttggggagcaggataagaaaggagtgaggtttaaaaaaaaaatccccacaacagcctgcttatagcttgttgtctcctctgccctgtctctctttttttttcctgcacgtgatatttgtgaagttggattcacatgtgtgtgccctttccccctctgcagacagcttgaaaaagtccttctctggcgtgtgatttttcaaagtcctgaatgctttgtcttgtcagcttcaggttcctgagtcactcggcccctcttccacccctgggcgctgcagttagtggcaggcttttttttttgttttttttttttgtttttgttttttttgtttttatttgttgactttgtaaatattagaggccttttttttttgattaaaaatattccctatggactagatatctgacagtggaataactagaacaagaacaaaaagatgctacaattaaaaaaagggacagtggttctcaacctgtgggttgcaaccccttttgggagggtcaaaggaccctttcacaggggtcaaatatcagatatcctacatattggttatttacatcatgattcataacagtagcaaaattatagttatggagtagcaaggaaataactttacagttgggggggtggggctctccacaacatgaggaactgtatcaaagcgtggaggcattaggaaggctgaggacatctgctttaaggggaaatgatttctgaaagtcagggctggggttcagttcagccttgacatttaggggaaggggtctgtgcccagatgacctgcttttgggggaacagaacagagtgtgaccatcatcagggaacaagctggtggtccctggcagggacatttagaaaactggcttccctaattagcctgggttgggttggaatatgctttgctctgggctggtaggagaaaggagcaagaggtagtgagatctatgggaaacccagcttggtggctttccagccaaaggcacacatagcccagcagaagtgttccttcattggagaaaagccatgacacattggtggctttgagattcataaaacaatagagaaataaacacactgagagccacccgtgaggtagggaaagggcgcacatgtccgttcacccagaggcccagaggcccaagcattgagctggaagcttttgcaattgagaatgaatcttcttctactggggagggacctaaagacagattaagaccctcctggtgcctaaccaggtagagtttggccatgtcaggtccaaagagagaggggcggctatgcttgcctccccagatccatcgataggacacagataccaaccaaacaaagccccaagctgtaatggaaaaaaaaaaccaaaaaccaaaaaccaaaaaacctagcccacacagaggaagaaaggtctaccatgcagctatagagaggatggcgggcagtggagctggaagatggaagtcagaggcaccttgggagctagctcgtggagccctggaaaaggatctggaactggaaacaaaaaaaaaaaaacaaacaaacaaacaaaaaaaaaccagactctgacctcttatgtaatgaaaatctctgagttcaaggccagcctggtctacagagctagcttcaggacagtcggggatacacagagaaatactgacttgaaatacaaaatgaaacaaaagaaaatgtcaatttaaagaaaggtgccgccgggcagtggtggcacacacctttaatcccagcacttgggaggcagaggcaggtggatttctgagttcgaggctaacctggttacagagtgagttccaggacagccagggctacacagagaaatcctgtctcaaaaaacaaatgagagagagagagagagagagagagagagagagagagagagagagagagagagagagaagaaggagaaggaggaggaggaggaggaggaggaggaggaggaggaggagaaggagaaggagaaggagaaggagaaggagaagagaagagaagagaagagaaaaaggtgcctatgtttaaggcagagtgctgaagtacttcagaatctagaatacaataccattagagagggagattgttgaagtgacaggctgggccactcttcaggcagagggacagtctctataggctcgttcatttgattcagtgcaatgaatagaaaatggctgatacacccaaacacgcttgagtgtgtataaggtaaagtctagtattggacttgtcctcattagccctggagactggaggacagggacatgccagcagcagtcacagggaaatgctgttttcacggggattgttgaaatcacaggactcgagcatgtcacagcggggaggaagtcaccaccagaaacttaaccatgagggtaaacagaggaacagatcaggacaggagtttgagtgtgtagcaagcacttccacctaactgggcaactgggctggactctgatgggggaaagaatccgacagtctagggttttcaaaaaagcctaagaacaaattacaaaaggctggaagtggatgggagagtattggggaaagcagtaatgcagacgtaaaactaaagatggctaggtggggtggggcacacccggagtccctgctattcagtaggtcgaagcaggattgcccaagcctgtaagtttgagctcagcctggaccacacgttgagattctaagaaatacaaaatactataaggtgtcaacaatatagaaacgatataacgatatagaaggcttagtttccaaaggacgtggcagtgaaaagcttgggaagtaaaagctaattcagattcggattcaggtcacagacacgactttgagcctgctgaggtgctcagtggtaaagatgttgtgtttgaagcatgaagaacctgagtttaatccccaggacccgcagggtggacgtagggagcggactctgctaaactcttctctgacctccacgcctgcaccgcggctcagctcctgaccctaagtcaataaaggtaaaacggcaaggatatgttttcatagtccgggtgagccagtccacacacaaaaaagcccacagtaccctgacttcagaagtgagcctttgcattctgcaaatggataccaatggatacaaatggatacaaatctctttacttctttgtcttgggaactttatgaacttgattgtgggtcagaaggcaacccttcctgcacctttaaacatggcgacctccctgagtcattatttgcctttgataccataagttggacagatgttgagaatgcgtggtattcgagactaagagccccaggggctggagagctggctcaacagttaagagcactggctactcttgcagaggacctgggtttgctctccagcactcatgggacagcccataactgcctgacactccagttccaggggaatccatgactcttatgacttccacgggcctcagacatgcacatacaaaatacttacatacatacaataaaaataaaccccgaaagaaaaaatattctaaataagtagccaaaattacttgaaaagactagtaaaatgcatgtcacacttatacaggcaaaccttactttccacatactttgcacatgttgagaattttgaaaacggaggcttgggacaaccctgtatggagcccttcatgcaggctttccttagcagcacctgatagcttcgagtggtcctgcgccatcggaatctattttgaattttcagcatatggtagattattatagccactgtggagatctgtgacctctgatcttgctgtgtgactggttggggttactgtaggccacactcttgtgagacactgagttggtaaatgtgtatgttctgagcgctcgctctgtggattggccagtatccttcacgattcctcctctagcttccttatcccgagacacagttaagagcaccagttaataaaataccccagggacaggaagagtcacctgtctgtcactttagatcaaagctagaataggttcagcccaggaagggatatcaagaacagagacagggcagaagccaggccttgtaatcagtcaagccatgaacgccagagaagggctcttgggggccagggggatggtgtgggtgggcaggaaagctactcttataagcacagacagagataccttatttcagtatggagaaagcgccagtggtctggttagaggatcaaggcagccacagcactcacaaagtcccgactcaccgcagttcgagaaagctacgatgggaaaaatgacagtcagcagggaggctcccagtctttaaggaaagaatccggtccagagcatcacagcaggagatgaagcagagggtgctgatgcaggagagttagccgagtcactggctgtgtgaccaaggatgaaggatgctgggcagtacagtctcagagcggatgaaataatctccacgcgatagtggattctgccactatagagagacgtcaatgctaagcttcgaaagccttgggttggggctaatgtagctggtggctatatgtgaagagctagtttaccgttctcctgccccccccctcccaggattatcttaaatccactttgcactccgaagcctgggtgacagtacatccatttattacgacatgatttactgaaacatttgagccccgccattgagacctcaaaagaaaagttctcatcccgggtatcgctgtgcattgatggtgcgctggtcacccaggggcctggtggagatggatggtaagatccatgttttcgtgcctgcagatgtcccatgctttctgctgcccacatatcaagggggcagttttgacttctgaggcctgttatttaggaaatgcatttcctagagctgcggttgccatagttattcttttggtggaggtctttctggagaggatttgctcttctagaagccatttaggacatcagtgattcttgagaggaaagaaaaaaagcagcctgtaataaattgatgctcattcgtgtggaagtagctatatagatgggctatggtgggaagccaagccagaagacctgactcagcaaaacactacagcagtggttctcaaccttcctgatgctatgaccctcgtggtggtgggtgatctcccccccccccccaccatagaattattttcgttgctgcttcatacagtaattttgctactgtcatgaattgtaatgtaaacatccctgtctttcgatggtcttaggcaacctctgtgaaagggttgtttgacatcccccccaaaaaaaaggggtcacaactcacaggttaagaaacactgtgctacagtcaaatagtaacactgctatggaggagttgtgtatggatgaaccaagagagagcatctctggagaagatgctgccgaggtgagactgcagcaagcataggattgtagttcctgaagcagcggctggggtccatgagagagacttcagctttatggaagttgtacaatgtatcagaagaacctgctcctcccccaccccgcccttgtagctacccacagaatgttaacatgagacaacggaaagtatgcaggggtctatgtgcatgtgagaccaggtgctagaaacagtgttggatcccctggagtggagttacgggtggctctgagttgccggatgtgggtgtttggaacctaactctggtccctgtgggatcagcaagaactctgttttttttttttttttttttttttttggtttttcaagacagggtttctctgtgtagccctggctgtcctggaactcactctgtagaccaggctggcctcgacctcagaaatccacctgcctctgcctcccaagtgctgggattaaaggtgtgcgccaccactcccagccagcaagaactcttaatgcctgggccatttctccagctcctgccttggtttttgggacagcttctctcactggcatagagcttattaattagggtaagctggctggccagtgagccctggggatccacctgtctttgactcccttgacgatattaagtttgtatcacttgggtcaaggtttcaggggatcatcttcatgcgtacagcccaagctcttatggaccgagcatttccccagccttactctgccttttaagtcccttaatgaatgatactaagttgtctgctctcagcacctctgtcctcacctggtgccaccctcttcctcgtgaacacgtgcctgcatagacacccatgagccagttgatctgacctagtgatgcgcagattcaactcagaaagacacacagtgctcttgtgtttcagggttttatatcaaagccacatttggaagaccaaggactgtggcagctgctagcttttgtgtaggcgatgatggatgatggtaaagcagaggccagaggtcaacaggagagactccaaccttggaaggaagttctactatgttgcaaaagtcacctttgcttaaattaggccctgccctccaggagctgacccagttgcaaaacctctgccctcggttcttccaggcactcatgggagactctaggtgtgtctcccatacgggcttggaagaggtcactcacaaggttgttctctcccccccccccccccccccaggagagtgaagaggaactctattcctcctgtcgccaactgcggaggcggcaagaagagctcaacaaccagctcttcctttacgacacgcaccagaacctgcgcggagccaaccgtgatgccctggtgaaggagttcaatgttaacgagaatcagctgcagctgtaccaggagaagtgcaaccggaggtaggtgtacccataacccctccaacccctccacgtcccctccaatcccctaaagtcttggagcttctaggagcgacctagaggcttcctaacaccttaagcaaatgaactaaccttcaaagaacactgcctaagctccgcccaccaggtgtgttctcattggatccttaaagagccgccattgccaaggaccaagggggaagtggacattccccaaggctcagggggtatgctaggagcccagagcctcctccactcagccacaggtgacctgcgaggtagggtgggagttacccactgatgggactcaatctcctgtatttcaggctgagagagaagagagtaagcaacagcaggttctactcctagaagccgtgtgtgcgtgcgcgcatgcgcacggtgttcacgagcgcatctgggtacgggagagccttataaacagcccccaggaagagattcatctgtgacattcatcgtcctctctccgagccactcaccatagagatgacagttctgaagacgcccccgtgggcaggaggcgttgagaccttcctgctatttttccaccttggacaactttcttaacttatactacccctgatagaggatccccccaactgtgtgccttttgaacttccctgttctcagcctcattgaataaagacaacagtttcatgccgttaagcgttctgtacctgatctgtacagtaaacaggagttcctctgtggtgagcaagcttctacctgtgtgacccaggtaactgacttccccggaaggtgagctgagacacggggaactaattcattagattccaaaaaaaaagatttcagctaagaggcaaatgattctatagttcaggccaccactgtattctacacaaccccaaaggctggtcaggagctgacctcaatgtgtgttagctaccactggcaaagcagttgtctagacaaagctacatggaatctgcagaaatgggagatagagtctgcccttaagacattttttctttgactcatggctagtgatattggagtgctggggtgctagcttattgcatgtccttgttgtatctgccccgactcatcacatccagggtcctcttgagtctggtaggaggctgctgccaagatcctctggggccacagccaatagcatcattgctggtcaaagaggcagctgaaaggtaggtttacaggcaaatttccctgggttatcgaacattcgggtgcatcaagttaagctctgatggaattgatgttagagtgtttcagaaatcctgtggctactccagacccttgtgctaccactgagctaagtctccagctttataaaactcttaaaggagaagacagacaaatagtaaactcagggcttcttagtgaatggagaattgccttgggaaagcaggtgtagctatgaacagctgagatctgactgtgggtgggggaggagccaacagtgagctgctttgtaacagagtggaacctggggtcaggaaccctctggggtctctcccctctgggtgagatccaaaatggtggccttaatgtatgtgttgctggagaaaagattaaaaactagctctctctctcctgtcccgccattttccaagtcccctgagcacagctccatcatagaccaacctccaagatagcgtcttctgtccttggaagaaagcatttgttactgggtccaggggctacatccaccatgaacccagaggaggattgctagcttgtaactcctctgattcccaacttggtatttcctctggtaattgacaaggaaggaaaggaatcctgccaagtgggtgacttgggtaaaaggctgtgtgaagcctgcatggaaggacatgtcaggctctgtagcagcttcccactggctgggaccaggtaatgtattgtgtcgtcacctgtgcacggcagaacttggactgctgccatcctcccacccatcatccctccaccttgctctgttttaaagtccaattgctaaggctggcgtcttcattgcttaaaatgggtatcttcgctactgtatcaaagaaagtgagagatggcgggtaggaggcagcaggaagcatctcttttacagtgaggtgtaccctgcaggacagctgtaccagtgagctgggaagaacggtctcttcctgctccatcactagggggcactggtgaggttcttttgtcctgagcttgatagggtcatgcactgatttgtttcttggtggttgacgtcaaggtccgagtcagttcctttacagaaggatcccttgagcctgtcctgatgccatgtgtccttgtctagacaccgtgaatgatagtagcagcactggtgacaacaaccatggatggtgtcctggtgagaggacagaattagccagagccaggttgaccccatggcaggctccaaactggcagttgggggagattaggctttcttttctgtttcccgtaattgaaaaagtccaaaacaagtcaattccagggaaaactacccctcatgggcagccaatcgggagctgtagatgctgccccaccacttagcttgagccaagtatagttaaccagcaaaagtcccgaaaatcccccagagccttaaccaatcacaagggcatccatacccctggagacagagccaaccaaccaagggaaagaaaggtaaaagccacccactcctaccctaacaggctttaaattgaccctgcaaaagccacacctctatcttccattctgatgcatggtggacccttgcatgcaggttctctgaagaataaacgcttttagcggttgcatactattttgcatctggggtatcattcttcatgaatcacagagacccttacaatgtcacactggtttgcccaccatcctttgtgtattatttgggacattggttacatgagaaagtacaaagccaggtggcaaaggtcaccgggcacgagaaacttcagtaaacaaagttgcacagtttgtgtgctgcaacgtgtaggtatgtggtaattaaacagggtgtagaggcctgcatttcctaaggtgaccctgggatcctctagcctagcatgatgtgtgcatccagtctactgtagaaaatgtttgagggcaattaaaaaaatccttttaaaagattttatttttaggtgtgtgcatatgtgtgtctgtgggttagtgtgtgcacatgggtgcagtacccacaaaggacagcagagggcgttggattccctggagctggagttagaggtggttgtaaaccatacaacgtggatacaagagtccaaacccaggtcctctgtaagaccagctagtcttgacttccccggtctctccagctccaccccaacacattctgctctttttttttttttttttttttttaaacaaagctgcataacaaaacctagtcatttatatgtttccagaccaacttacaacctaaataaaagtcaccatggccagggatcttaaagccactgaccaggtattgcctacagactcttatcttcctgttgtgcccttccttttctgagactcatctaagcagccgatgcattgtcaccttcgaaaagctcggataacagaacaaaagcccttccacacccagaccccaaaatggtggctcctggcctttgcttttgtgaatgggctgaacatctggtggattttttactttttatttttatttattttattatggttttccgagacagggtccccctgtgtagctttggctgtcctggaactcattttgtagaccaggctggcctcaaactcagaaatccgcctgcctctgcctcccaaatgctgggattaaaggtgtgcgccaccatacctggtggatttttttacttttaacactgagaattttaaaacaaagttacacagatgttctaacatgtgcccatgaagaagagccctgctatgctgctatcctgaagtgtctcagctgtctcctgacctgtgtgagcagggctcactggcacccctccccacaagaaatgtaaaagggagaccatggcgactgtgccttggctccttcctaggacggcagtgctgacccgaagccaggggctatgagtcactcagaggaggcaccattgtctcatgcttccgaagtatctttttactgtgtttaatgattcatgtgttaccacttgtatcttgtgtttttttattgatcaagcgcaattaaaagaatttaaagccttagagcctcccgatcagtagatagataatatgtaaattttgtttaatagatacagttaagtggcgtggaaagcccagagtaattagacctcagatgtggtagggggtgggggaggcatgagatgaaaataaaaattccaggagcaccagggacgacaggaaaacttcccacttgaagttgcctcctttgtgttggttttgaagggagggtgttgtctgtcaatcagagcctcctgaggacgtctgaaaaggaatgttgctctaatgtgaagaagtgtctacactgtaccaattttgcagctgtgtaagaggaaaaatttagatgttgatttaggaatgttcacagggcacacacagatagtaaggaccatgtcagaggtagttgagagagggcattttaagactgctgaccgacttgtgtgtctgtgggttatattgtattacatactaagttgccattaagttagaatggctacaaggagccccgatcttttccattgtaacagaggtgcatattaccctgtacatggctaataccgaatttggaggttaccaaagctatgttctaaccatacaagtgagtattccagaaccagaaagctgtagttggagtttagaagtcacccagtgatgtaacttgggtcttatttaaatatttaaaagggattttaatttgttttgtttgtgtgtgtgtgtgtgtttggtttttttttttttttttttttttttttggttttgtttttgagatagggcttctctgtatagttttggctgacctgaaactcactctgtagaccaggctggcctcgaactcagaaatccacctgcctctgcctaccgagtgctgggattaaaggcgtgtgccaccactgcccgacttaatttagtttttgtttttgttttttgggtttttttgttttttcgagacagggtttctctgtgtagctttggctgtcctggaacttactttgtagaccaggctgacctcgaactcagaaattcgcctgcctctgcctcccaagtgctgggattaaaggcgtgcgccaccatgtccggcttaatttagtttttaaactaggtagatttgtgccctgagtgtgggtttgtacatgtgaatgtagtgtctgaggtggccagaagagggcatcagaactcctggagccagaggacaggcaatagcaagcctccggatgtgggtgctgggaaacagaccgaggtcctcttttgtagtacgtcattttgtagaacaggaagtagtcataaccactgacagctatccagcccttgtcttgggtttttgtccttcaagagccacagcccacagcaatgcaacggccttcctcagaaatacccacattgctgatttcagcaggcttgacaaagctgcctgtgcaaactagtgtctcattattaaaacttaattctatatgaaaaatatgtgcttgtgcataaacagagaactaccagagtgagacatggagatataggctattgttaatgcgatgtaaaatggttgcattgcattacgaaaaaatagaaacaatctgataaatacagtgtctgcctggaacctttttgtttttttaagcctgtcatttttcatcatttatgctcccaaatgaaatgaagaatgggttcagccatgagaagggcaaagtcacactcctctccccacccccacttttaaaaaattctccattttatcttttacgttttcctctagctggcaagtccgtttctctcagcaagcctcattctttagaaacccacagttataaattcaaacacaactcaccctttgaagaaacccacagttataaatcaacacatggcccgctcttccatttgctggcctttggaagaacggctagagccagaaagagcgaatatggttgttgtaagcattcacggttctcagaaaagtgggggttagtgctaggagtgttgatgtggtagtttgaagatgcttggcgcatgggaagtggccctattaggaggtgtggccttgttggagtaggtgtggccttgttgaatgaagtacgtcattttgtaggtgggctttgagtgcgcctagtactcctggcctacccaatgcaggagaaagagcattctggctgcctgtggaagcaagtctcctcctggctgcctttggatcaagatggagaactcttagctccttctccagctctacatttgcctgcaggctgccatgcttcctgccatgataatggaccaaacctctgaatgaaatgttgtcctttataagagttgccttggttatggtgtctctccacagcaatgaaaccctaactagtcatgccattttcttgccagctagcatccttggcacacaggaagtcatgttgtttagccatcaataatcagcaatcaataatcaaagttagtcactccagcctgaagacttcagaacagcctatggcaaacctctcgatagcacatgaacaaggcgtaggaagaagcaaagcagaaattacaactatgccataatcatcttatgccacaaaattccatcagcccgataacaaagggactgagaaaaagttgctattgggtcaaaggaaaattctgagaatgacaatatagatatgccacaaatagtctagggtgtttgagtctataggatccccacgtttcttgttgtttccatagtgtaagtgattattgtccattgatacattcttaggtcctatggatgttcagctgagcattgctttctgaatactgatcactggtatgatagttttaatggtgaactttccaaagcctagaatcacctgggaaatcctcagttgatgaactgaccagatcaggttacccatggccatgtatgtgggggattgtctaaagttattgatgcccaccgtgggaggtaccattccctaattagtgagatcctttctgccctaggttgccttttctcaaggcattctctctcagcaacaggcatgatattaggacaactggtctgtcctgttttgtgtctactgcactgttatttttgtatggtttccggtcttgaaaaaaaatctgacctctgccttacactacacataagtgggtaggtggggcgatggggccaaagaaaggtgtcagtttgattcttcacaaaggactaaagccacagatgcccagctataaacagaaggggagcagcttgtggaaaactcagaaataaacaggaggaaatgaaagccttgtgagatccagagccctggggcagcagcatagcaaggcagtggtcctcgcctgttgcgcatctccacagctgggggtatttcccttctgtctgaggcaggatgctagaaagggttccagcacatccatgcatacgctcatcactcctggtcctgtaaggcttacagccactgcagagttatagtctaaacgggtttgagatctgcatagtagcttggctttaaaaaatgactctgcttggcttgctaggaacatgcagggtcttaaagccaggagctatcttagggatgccgaaaaaaggaccccacagacatcttgctgcgctggctcagtgggtggttctaaggagccaaaggtagctcactgacacagacacgctaaatgttacagcatgggggaacacagagaatgccacccccaagacctgggaggcataggactgccatctacgactgggacatgactagtcacatatgttttttgtctgagtgttaaagttacagggtggggttgcaagaaagcaggttggtgcatgaagatatctttcaacccactacatccagacagtaataaaggaagaaaaaaaaagagggagagaattcctaaggtattaagagcaccattaaaagatcagatgtttgcgtgattggcaaaccctgagagtaaatgtattgactagaagatacacatgtatgaagtcatcacttaattaaaaaccccactcatgggctggcaagatggctcagtggttaagagcactgactgctcttccgaaggtcctaagttcaaatcccagcaacgacatggtggctcacaaccatctgtaatcaaatcttacaccctcttctggtgtgtctaaagacagctacagtgtacttatatataataataaataaaatctttttttaaaaaaacccagtcattcaaataataatagaaaacctgttcgctctcgggaaagacacgagcaccacattggctggttttatgtgtcaacttgatacaagttagagtcatcaaagaggaagggatttcagctgaggaaatgtctccatgagatccagctgtaaggcattttcttaactagtgatcactgggggagggctggcccatggtaggtggcgccatccctgggttttataaggaagggggctgagcaggccatgtgaagcaagccagcaagcagagcccctccatggcttctgcatcagctcctgcctccaggttcctgatctgagtccatcccctgaattcctttagtgatgaacagcaacgtggaagtgtaagctgaataaaccctttccttccccaaacttgcttcttggtcatggtattttgttgcagcaataaaaaccctaagacgaaagcacctacaggtggacacccgacagagctgactgaaaacatggctcagtggccagattgtagccgaaagttcagggcagaatgttagatcccaccggagtaacgtggcaagtcactttaagggcactcctgtttgactgccagcaggcttctcagcagggacactataggctaggaaatagaggatgctgttttttattgtgaaaataaagttaaatgaaaactaattgccaatcaaggttgacatagccagaaagtctatcttaagaacagaagaaagtctattctaaagtcggttcaaggtagagggacactaagagaattgaagaccttggagcaacattcagaaagatgtttttcagaaccaagggacaaaagcagagcttccaagaagttccaaggtgagcaccaactgagcgggttcaagaccttagaaaccatgcgtaagggactctgtcatgtagacatggatgaaagagaaagagcatgaagatacagtaaagacactagtctaactggagtagagaacacaggtgagagcagagaataatcaaacacgaacaatacactagaccatcaagccataaagagtaaaccaacccactattgcatatgccagaaagatttttgctgaagggaccctgatatagctgtctcatatggcaaatacagaagtggatgctcacagtcacctattggatggaacacagggcccccaatggagatgctagggaaagtacccaaggagctaaaggggtctgcaaccctataggtggaacaacaatgaactaaccagtacccccagagctcatatctctagctgcatatgtagcagaagatggcctagttggccatcattgggaagagaggccccttggtattgcaaactttatatgcctcagtacagggaaatgccagggccaagcagggggagtgggtgggtaggggagcagggtggagggaggatatagggaactttcgagatagcatttgaaatgtatataaagaaaatatctaatgaaaaataaataacaaaaaagagcaaaccaaccaaccaaccaaacaaacaaccaatcaaaataaaagagtatctcaaatgaggtaattttttaaaaatcacaggaataagtccctattttccaccaataacttgagtgtaaatggtcccagttgctcatttacaatatgtatgcacagactggctgaaagggttatgacccaacactgtgctgagaggacaaaaaaaaaaaagaattcaaaatcaaaatcaattgtagttgagtagttgtgctcacaactgacagagcagactttcagacagacagtgagacaggaaaagatggtcactgagttgtggtcaagagagcaaaccaacaggatagcattacaagactatggataactcaatgttaaaatgatttgattttaaagtgtgtgtgtgtgtctgtctgtctgtcggtctctgtgtctctgtatgagtgtgtctgtatgtgtgtatgtgtgtgcagtgtccccagaggccagaagagggcgttgggtcccctaagctggagttacaggtgcttgtgagtggcccaatgtggatgctgtacactgaatttcagtcctctgcaagaaggataatgtgttctcaatggctgagccaacactccagcctaagatctaagattatatgtatgtagtatgtatgtatgtatgtatgtatgtatgtatgtatgtataaacacaggtagacctacagacaagctcccgtaaatgatacttgggcatttacatcctatccttactaatggattcactattcaaaccctttcaaaagagcaacaaagaagcataaattattctataggtcaaagcactcaaccgaaatgcatagaacactctatccagcagccgcagag

SEQ ID NO: 205 - DNA, 4402 bp, Mus musculus
atgctctggcgggtcgggacccgccttgagacagggcggcgcgttaaggggggcggccccgaggagtcacgtggcgcggccgcctccaaagcagaagtaaggagcgccgctgagcaagacctgcgctgccggactgcccgggccccaggcggctgctgcacgagggacccccgagtccccccaacccgtggctggcaggcccagggattgtgcgggtggctgcgctccgggggtaccgccagcctccatctttctcctgcttctcccgtctccctggagcggctgacaatgaccaccatggtcaacgtggacacccttccagaatatgagaagagtcagatcaagagagcgctggagttagggacggtgatgaccgtgttcaacgcccgcaaatccaccccagagcggaggacagtacagatgatcatggagactcggcaggtggcatggagcaagaccgcagacaagattgaaggcttcctggacatcatggagataaaggaaatccgtccggggaagaactccaaggactttgagcgagccaaggctgtccgccacaaggcagaatgttgcttcaccatcctctacggcacccagtttgtcctcagcacgctcagtttggcaacggactcaaaggaggatgcggtgaagtggctctctggtttgaagatcctacaccaggaagcgatgagtgcatccacccccacaatgattgagagttggctgagaaaacagatttattcagtagatcaaacccgaagaaacagcatcagcctccgggagctgaagaccatcttgcccctggtcaacttcaaagtgagcggcatcaagtttctcaaggacaagctggtggaaatcggcgcacagaaagatgagctcagctttgaacagttccatctcttctataagaaactcatgtttgaccagcaaaaatcgatacttgacgaattcaaaaaagactcctccgtgttcatcctaggaaacacagaccggccggatgcctcggctgtctacctgcaggacttccaaaggtttcttttacatgaacagcaggagctatgggctcaggatctgaacaaagtccgggagcggatgaccaagtttatcgacgacacaatgagagagaccgcagagcccttcttatttgtggatgagttcctcacgtatctgttctcccgggagaacagcatctgggacgagaagtacgatgcagtggacatgcaggacatgaacaaccccttgtcccactactggatctcctcttcccacaacacgtacctcactggggaccagctgcgtagtgagtcctccacggaagcgtatatccgctgtctgcgcgctggttgccgctgcattgagctggactgctgggacgggcctgatgggaagcccattatctaccacggctggacacggaccaccaagatcaagtttgatgatgttgttcaggccatccgagaccacgcctttgttacctccagcttccccgtcatcttgtctatcgaggagcactgcagtgtggagcagcaacgtcacatggccaaggtgttcaaggaagtgttaggagacatgctgttgacgaagcccacagaggccagtgctgaccagctgccctcgcccagtcagcttcgtgagaagatcattatcaagcataagaagctgggtcccaagggtgatgtcgacgtcaacgtggaggacaagaaagatgagcacaagccccagggcgagctgtatatgtgggactccatcgaccagaaatggacgcgccactactgtgccattgctgacgccaagctgtccttcggtgatgacattgaacaggctgtggaggaggagccggtccaggacactccccccacggagctgcattttggggagaaatggttccacaagaaggtggagagtaggaccagtgcggagaagctgctgcaagagtactgtgctgagaccggggccaaggacggcaccttcctggtgcgggagagcgagaccttccccaatgactacacactctccttctggcggtctggccgggtgcagcactgccggatccggtctactatggagaatggggtcatgaagtactacctgaccgacaacctcacgttcaacagcatctacgccctcatccagcactaccgtgaggcacacctgcgctgcgcggagttcgagctgcggctcacagacccggtgcccaaccccaacccacacgagtccaagccgtggtactatgacagtctgagcaggggggaagcggaggacatgctgatgcggatcccccgagatggagccttcctcatccggaagagggaggggaccaactcctacgccatcaccttcagggccaggggcaaggtgaaacattgtcgcatcaaccgggacggacgccacttcgtgctgggcacctctgcctactttgagagcctggtggagcttgtcagctactacgagaagcacgcgctctatcgcaagatgaggcttcgataccccgtgaccccggagctcctggagcgatataatatggaaagagacatcaactctctttatgacgtcagcaggatgtatgtggacccaagtgagatcaacccttccatgcctcagaggaccgtgaaagcgctctatgactacaaagccaagcgcagcgacgagctgaccttctgccgcggtgccctcatccacaatgtctccaaggagcccgggggatggtggaaaggggactacgggacccggatccagcagtacttcccgtccaactatgtcgaggatatctcggcaggcgatgctgaggagatggaaaagcagattattgaagacaatcccctcgggtctctctgcaaaggcatattggatcttaatacctacaacgttgtgaaggccccccaggggaaaaaccagaaagccttcgtctttatcctggagcctaagaaacagggagatcctcccgtggagttcgcgaccgaccgtgtggaggagctgtttgagtggtttcagagcatacgggagatcacttggaagatggacaccaaggagaacaacatgaagtactgggagaggaaccagtccatcgccattgagctctcggacttggttgtatactgcaagccaactagcaaaaccaaggaccatttggaaaatcccgacttccgagaaatccgctcttttgtggagacgaaggcagacagcattgtcaggcaaaaacctgtcgatctattgcgatacaatcagaagggcctgacccgagtctaccccaagggacagagagttgactcttcgaactatgaccccttccgtctgtggctgtgcggctcccagatggtggcactcaatttccagactccagacaaatacatgcagatgaaccacgcgctgttttcgctcaatgggcgaacaggctacgtcctgcagcctgagagcatgcgctctgagaagtatgatccgatgcccctggagtcccagaggaagatcctgatgacactcactgtcaaggttcttggtgcacgccacctccctaaactagggcggagtattgcctgtccttttgtggaggtggaaatctgcggggctgagtatgacagcaacaaattcaagacgacggttgtgaatgacaatggcctcagccctgtctgggctccaactcaggagaaggtgacatttgagatctatgatccaaaccttgccttcctacgctttgtggtctacgaagaagacatgttcagtgatcccaacttcctggctcatgccacgtaccccattaaaggcatcaaatccgggtttagatcagtccctctgaagaatgggtacagtgaagacatcgagctggcatccctcctggttttctgtgagatgaggccagtcctggagagtgaagaggaactctattcctcctgtcgccaactgcggaggcggcaagaagagctcaacaaccagctcttcctttacgacacgcaccagaacctgcgcggagccaaccgtgatgccctggtgaaggagttcaatgttaacgagaatcagctgcagctgtaccaggagaagtgcaaccggaggctgagagagaagagagtaagcaacagcaggttctactcctagaagccgtgtgtgcgtgcgcgcatgcgcacggtgttcacgagcgcatctgggtacgggagagccttataaacagcccccaggaagagattcatctgtgacattcatcgtcctctctccgagccactcaccatagagatgacagttctgaagacgcccccgtgggcaggaggcgttgagaccttcctgctatttttccaccttggacaactttcttaacttatactacccctgatagaggatccccccaactgtgtgccttttgaacttccctgttctcagcctcattgaataaagacaacagtttcatgccgttaag

SEQ ID NO: 206 - protein, 1347 aa, Mus musculus
MLWRVGTRLETGRRVKGGGPEESRGAAASKAEVRSAAEQDLRCRTARAPGGCCTRDPRVPPTRGWQAQGLCGWLRSGGTASLHLSPDVSLERLTMTTMVNVDTLPEYEKSQIKRALELGTVMTVFNARKSTPERRTVQMIMRQVAWSKTADKIEGFLDIMEIKEIRPGKNSKDFERAKAVRHKAECCFTILYGTQFVLSTLSLATDSKEDAVKWLSGLKILHQEAMSASTPTMIESWLRKQIYSVDQTRRNSISLRELKTILPLVNFKVSGIKFLKDKLVEIGAQKDELSFEQFHLFYKKLMFDQQKSILDEFKKDSSVFILGNTDRPDASAVYLQDFQRFLLHEQQELWAQDLNKVRERMTKFIDDTMRETAEPFLFVDEFLTYLFSRENSIWDEKYDAVDMQDMNNPLSHYWISSSHNTYLTGDQLRSESSTEAYIRCLRAGCRCIELDCWDGPDGKPIIYHGWTRTTKIKFDDVVQAIRDHAFVTSSFPVILSIEEHCSVEQQRHMAKVFKEVLGDMLLTKPTEASADQLPSPSQLREKIIIKHKKLGPKGDVDVNVEDKKDEHKPQGELYMWDSIDQKWTRHYCAIADAKLSFGDDIEQAVEEEPVQDTPPTELHFGEKWFHKKVESRTSAEKLLQEYCAETGAKDGTFLVRESETFPNDYTLSFWRSGRVQHCRIRSTMENGVMKYYLTDNLTFNSIYALIQHYREAHLRCAEFELRLTDPVPNPNFSKPWYYDSLSRGEAEDMLMRIPRDGAFLIRKREGTNSYAITFRRKVKHCRINRDGRHFVLGTSAYFESLVELVSYYEKHALYRKMRLRYPVTPELLERYNMERDINSLYDVSRMYVDPSEINPSMPQRTVKALYDYKAKRSDELTFCRGALIHNVSKEPGGWWKGDYGTRIQQYFPSNYVEDISAGDAEEMEKQIIEDNPLGSLCKGILDLNTYNVVKAPQGKNQKAFVFIPKKQGDPPVEFATDRVEELFEWFQSIREITWKMDTKENNMKYWERNQSIAIELSDLVVYCKPTSKTKDHLENPDFREIRSFVETKADSIVRQKPVDLLRYNQKGLTRVYPKGQRVDSSNYDPFRLWLCGSQMVNFQTPDKYMQMNHALFSLNGRTGYVLQPESMRSEKYDPMPLESQRKILMTLTVKVLGARHLPKLGRSIACPFVEVEICGAEYDSNKFKTTVVNDNGLSPVWAPTQEKVTFEIYDPNLAFLRFVVYEEDMFSDPNFLAHATYPIKGIKSGFRSVPLKNGYSEDIELASLLVFCEMRPVLESEEEKSCRQLRRRQEELNNQLFLYDTHQNLRGANRDALVKEFNVNENQLQLYQEKCNRRLREKRVSNSRFYS

SEQ ID NO: 207 - DNA, 240136 bp, Homo sapiens
  misc_feature (1)...(240136): n = A,T,C or G
agatggaaccaatgtcagtcttacacatattgacgtattacgcctccctaaaatgtataaaaacaagctgtaccttgacctccttcgacacattcaggatctcctgaggctgtgtcaccggcacgtccttaaacttggcaaaataaactctctaaattgattgagccctgtctcagatactttggggttcacaatacttggcaatggtacatatttatggtttccatacatgtatacattgtgtaatgatcaaatcagggtaaccagcaaatccatcaccccaaaccttgatcatttctttgtggtgagaacattcagacgtctcttgtcgctgtttggaaacacacaccacgttattgttaactgtcctcaccctggggacagcaaggagggccgaaaggaagtgcaggctgctgtgagcgccttcaagagggagcagcactgagctcacctgcgagcctaggcctggagagcagctggagtctccagcccgaggggaggcggaggaggaaactgccttgcaggcagagggaagagcatgtgcggaggccccgaggcagagcctggcaattcgtcggcggaacagatgctggaagtggggaggaggaggaggaggaacaggaggaggtacgggggtctgggccgctgtagagagccgaggcctctgaagtctcagcactagggcagtgggaagctgttacagggtagacgcccgggatgtgggaggggctatatgataatctgggaggtttttttttttttttttttttttttttgagatggagttttgctcttgttgcccaagctggagtgcaatggcgtgatctcggctcaccgcaacctccgcctcccgggttctagtgattcttctgcctcagcctcccgtgtagctgggattacaggcatgcgccaccatgcccagctaatttttgtacttttagtagagacgggggtttcaccttgttggtcaggctggtctcgaactcccgaccatagatgatgcgcccgccttggcctcccaaagtgctgggattgcaggcgtgagccactgcgcccggcctgggagttgttctgtattgtggagtaaagggaggcagaggtgaagccatcgagagagcagcgagctcatcgctccccacattctattaaaatgcacattctcccgggagggggtttccagttaatgaaacaggaagcgaggtctgttgagcttgcaaccagctgagagcaatttgaggacaaaagggaagggcgggaagaagcgggatctcgggaaggtggcaggcaggtgagagcctggctggcccgttcacgcctgtctgcccctggtggccaggacgggaaggtcagaggacagggtcggaggcgccaacgctcctggggtcccagctgctgcagatccgggctggggctgggcctggccgctgctgggggcgggaggcaattcccagccccgggccggtgacgtcaacgttgtcatggagacccggcttccctgcccagcgttgcagctgcgggagcccgggctgggaggctctgtgaggctgagggaagcagagggcacagacctgggtcctgcaggcggtggctccacctaagagcacaaccctgccagaggcaggatgcccagaatgggcggggctccctgctgcacccagcccgccccgacccttgccgcccagacgtggcttcggccttgcgctggctcctggggtagcggatggggaaccccctgagatgggggcccaggcttccccaccttggggtccagggactgccctctcaggggcggactcagtccccaatctggaagttgtcttggcataagagtgttctggcatgctcctgtcgtcgtccccttaacaggagtgtttccggaccaaactgagggtggggctgcttattctcgcggcccaataacgagatgcagatgaacggggaaaggaaggagttgatttctgtaaccgggtgcagggagaaggcctggaaattatccccagaccaactcaaaattacaaagttttccagagattatataccttctaagctatatgtctacgtctgaatgtgtattcatctaaagacataagtgattaacttctttctttctttttttttttttttttttttggagacggagtttcactctgtcacccaggctggagtgcagtgcactgcagttcactgcaacctgtgcctcctgtgttcaagcaattctcctgcctcagcctcctgagtagctgggattacaggcatgcaccaccccgcccaggctaatttttctatttttagtagagacagggttataccatgttggtcaggctggtctcgaccttctgatcttgtgatccaaccacctgggcctcccaaagtgctgggattacaggcttgagccaccatgcctagccgtgattaacttctataactaaggtctgagtcctgaagctcttcctctggagcctcagtaaatttatttaatctaaatgggtccaggtgctgcggtgattacccttatcttgtctcctgctaaatcatgggggtttggggagttccttcagacccccaataaacttgcctgtggaggcctggggagttatttcagacccccagtaaaacttgtttaatcctaaacaggtcctgttaagaattccttcgttatcctgtcatgcttcaaggcccaggaaaggcccaggcaaaactcttggtgggcttttgtgacattccagcctttgtagaagggcactggctctctcagctattaatgtttcactgaactactcggtcagtgccgaagccgttgtgatgaagcctgcgttagtgagacccggcctgcacaggagcacatgaagagggaaccagaagcctcttactgacctccttccactccccccgttctgtttccaatgcctattcactaaggaacattgaccgagcccctccttgtgccaagcagtgtcctgaatgctttatgaggtcacggaatcctccctgtggccccaggacctacaagggacattttggaagccgctggtttatttattgttgagcacatatgtgttcacacatgtgttccctggagcacatgtgtgaaatggtgttcttcttggcgctatggactgctctgtcaaatctttccagtttgtttttttaatagatgtattttttgtttttggagacagggtctcactctgtcacccaggctgaggtgcactggcaccatcatagctcaccgcaccctccacctcctgggctcaagtgatcctcccacatcagcctcctgagtagctgggactacaggccagtgctaccatgcctatttttaaattttttatagagacggggtctcaccacgttgcccaggctggtttcaaactcctggccttcagtgatcctcctgccttggcttcttaaagcactgggattacaggtgtgagccgccatgcctgggcttttccagtttcttaaaatacctttagtagcacaaagtcagtctaagctagttaagactttggcctcaaaactcagttcacgtttccttcagcccctcccttttctgagcacctgcctcattttgctggggttgcccttgtcctccgtaggccattgctgcttctctggctgacaacagggatgttcaaatggtggtccaggtgtgagctttgggagagaccccatgaggcaggggtggaggtgatggtccccaggccatattccccccagccccttccccctgtgggccacctcccgctgccccctgctgggtctcttcttcctttctgggtggcataacaggaagctatctcaggcttactgcctcctggtgtccacttgactcccagaaagtcacactgccctgacctgtagactggaggacattgctgtggtcacctctccccacccaggcacctcttgctagctgcctttctctagtccaggcaggcagcatgaagatcaagcatcacctgccttgggctgggggtggctggaggacaggagtgaacccggaacctgggaaggagatttccctctttttctctccctgctcatggacctcaagtcttctgttggaggtgggatgacatatggagagagtggaacattttgcaccactttttaataagccctgaagtcgtcttttagttttctacctttagaacatggggaactcatgcctagatggtgatttctagactgctagagaaggctcactcagtctcctcttattttgaccatccatctacccaatgatccatccacccaccctctatccatctattctccatccatccagccatctacttattcatccatctgtccatcctctctccatccacccttccacctacccatccacccactcacccatccatccatccatccatccatccatccgtccatccacccacccattcatttatctatctacccatccatctatccatccattcaccatcatccacccacccatccatctatccatccacccacctatccatctattcatccatccagccacccatccatctatccattcactcattcattcatctatccatacatacattcaccatccatccattcatccattcaccctccattcatcaacgttgactgtacacctactatgtgccagtcactctggtagatgctgaggatctagcaatgaacaagcaagaccaaaattcccatgcttataaagcttatgttctgggaggagtcaggcaataacaaaatcaacaatgaaaagatatagtgggccaggcgtggtggctggtgcctgtaatcccagcactttgggaggctgaggcggtagatcacttgaggtcaggagttggagacctacctggccaacatggtgaaaccccatctctactaaaaatacaaaaattagccaggtttggtgggacccagctactcgggaggctgaggcacaagaatcgcttgaacccgggaggcagagtttgcagggagctgagatggtgccattgcactccagtctgggtgacagagcgagactccatctcaaaaaaaaaaaaaaagagagagatggaaaagatgtagtaccttaaaaggataaatacggtagagaaaaattaatccaaacaggggactggtgagagttgaggaggggtatccaggtggggctcactgagaaggtgacatttgagcaaaaacctgagggaagggagaagggagctgagtgggtatttggggaaagagtattctaggcagagggaacagccagtgcagaagcccagaggtgggagtgggcacagagtgtgaggagcaggaggaggggatgcagccagggcagagtgggcacaggggaggagaggggagggccgggtcagcggctgcttgcgggcctctgggtgtcattggtttcactgtccatccgctcggtccacagtagctccacatgcactgcagcacttgctgctcaccgggccccttgctgagggttcccctgtgcacgtgtcatctcatctccaaaatagtctcatcattctcattttatagatgagaaaactgaggcctgagcctgtaaggtgaaccatgagggatgagaagggaataggctggaagtgggtatttggggtgggtcgggcagagcccaggcctacatgacattctctgggaagaggcagccaggcctttgccaaaaacctccctatggctgccccagttggcccaggttcttgaacctagaagaacccaaatcttcttgtcacaaactctcttggggaggcaagaagcttctctgttcccagccttccaggatgaccagccccagcgggcgtgtgtgtggtggggtgggggagagggagggacagagccaggtttttcctaccaggcaggcccatgcagcttgcgcgtgggtgggtgagagaagggtgggtggttcttagcagaaggagatgatgccaaatgggcccaggaggtggccaatagcatccagaggccagagctgctctggcagaaccaggcactggctccatctcacagtggtccaggggccacatttgagcctcccttggcctgtcttggcaagaaatagagagcagacatttacaaaatgtttggttattcatttgacaaatatttacatgcgtctactgtgtgctaggccctgggttctgtactgagtagatgatgagtgagtgggtggatgggtgggtaaatgaatgagtggatgactgggtggatgggtagctggatcaatggatagatagatggatgatggatgaatagattggtgggtgagtggatgggtgaataaatgggtgggtgtatagatggatgtgtggattgttgagtgactcatggatggatatatattagttgtttattgctatttaacaaatcatttcaaaatttgtggcttaaagcagaaaatatttattatctcactatgtctctggctcaggaatttgggattgcctagctgggttgttctggctcagggcctctcacacggctgctgcaggatggtggcttggtctgcagtttcatatgacagctcgcctggggctggaggatccacttaatgatggatcccttgcacagctattaacaggaggccttggtttctcattacactggcctctctgtaggctatgtgagtgccctcatgatggcagctggctgtattcaaggtcagtgattctagagagaaagagaaagaccaagatggaagccaaagtgcctctgatgaccttgtctccgggtcttacaccattacttctggtttttcctttttttttttttttacctgttagaagcaagtcacaaagttccacccaaactcaaggggaaaggaagtaatttccacctctttgtgttttttttttaagacagggtctcactctgttgctcaggctgaagtgcggtggcgcagtcatagctcactgcagccttgacctcctgggcttaagcgatcctgctgcctcagcctcccaagaagctgggactacaggaacataccaccatgtccaactaatttttggtatttttagtagagagagagagagaggtctcaaactcttgagctcaagggatcctcctgcctcgacctcccaaagtgttggattacagccgtgagccaatatgcccgattagtttctacctcttgaaggaggagtatgaaagaatgtgtgggcacagtttaatagcatcacaagagataaatggctagagcagcaataattcttccagggtgctgaaatcttagaatgattttaaaccagggattctcaacagtaacttcatgttaaattcctctgggacactaagaaaatatcagttttggggaatcaaccttgacattcttattagtctggggagtgacttggacattggcatctgtgcttttgttttgtggaatgattttaagctttaattgtgaaacccagcatatatgttctgctttttaaaattataataaaaatataacataaaagttaccattttaactatttatttatttatttattttcaagacagggtctcactctgtcacccaggttggagtgcagtggcgcaatttcagctcactgcaaccttcgcctcccaggcttaagcaatcctcctacttcaccctcccgagtagctgggaccacaggtgcccgccaccacacctggctaattttttgtatttttggtagagatgaggtttctccatgttgcgcaggctggtctggaactcctgagctcaggtgatccatccacctcagtctcccaaagtgctgggatcataggtgtgagccactgtgcctggcccattttaacaatttttgagtgtcccattcagtggcactctgtacattcacactgccatgcaaccatccccctcagtacactttcatcttcccaaagggaaactctgggcccattaaacacaaattccccatttccgcctcctcctgcagcccctggcagccaccgtcctgctttgtgcctctatgaatccgactactctaggagtctcctgtttgcagaaactacagtatttgtccttctgtgtctggtttacttcacttagcacaatatctctgaggtttatccatattgtaccgtgtgtcaattttttttgttttgttttttgtttgtttgtttctttgagatggagtcttgctctgttgcccacgggagtgcagtggcgcaatctcggctcactacaacctccgcctcccaggttcaagtgattctcctgcctcagcctcctgagtagctggaattacaggtgtgcaccacgacgcccagctaatttttgtatttttactagagacggggtttcaccatgttggccaggttggtctccaactcctgacttcaggtgatccgcctgcgttggcctcccaaagtgctgggattacaggcatgagccaccgcgcctggccatgtgtcagagttttatttcttttacagttgactaatattctgttgtctgtctagaccacatttctttatccatgcacctgtggatagactttaaaaatccacagcggtgggtttttaaagtgtcctggtggtgctgctgtgcaatcagtgatgaaaaccaaagcctggatggcacggtggctcatgcctgtaatcccagcactttgggaggccaaagcgggtggatcactttgaggtcaggagttggagaccagcttggccaacatggcgaaaccccgtctctactaaaaatacaaaaaattagccaggtgtagtggtgggcacctgtaatcccagctactcaggaggctgaggcacaagaattgcttgaacccaggaggcagaggttgcggtgagccgagatcgcgtcactgcactccagtctgggcgacagagtgagactctgttacataaaaaagaaaagaaagaaaaaaccaaggcataagtccagcatttcgcaaatcctctctgcacaatagaatcacctgagagctgttttaaacaatgcggatggctggcgcctgtcctagagcagctgcatcagattctgggctgggggagaggtggggctagccaggaattgagttccttgcagcgcgggggagggcaaggtgtgcagaattatttcccagtctctgctgcctcctggtggcacaattgacaacagtctggtagtgacgcctgtcagcatggttcctcttcctctccagggctggcttacccagccccaaaggaccccactcccgggggtctggggaccctgaaggctcttgtctgacccctctccccacctgtatttcctggctggccttgcgtgcctctgtgtttagaagaaccgacgagtttattagagaaggaaagactgcactgtgtgaccttgaataagacagttcgcccgtgcctcagtttccctgactttcacgcaaggatcaccacggtttcctctgacaagttgctgagatggcaggcaagcatgcgtgttagggctggggaggccaccgcggggaggtttcgtaccctcagcataattgccattaggggccagatcacttggtggggaccgtccgtgcactgtagggtgctgaacagcttccctggccttgacctcctagatgccagtagcatccctgagctgggataatcaaaaactgtctccagataggggcaatgtcccctgagtgcaggattgccaaataaaatagttaaatttgaatttaactttgaaaatttgaatttcagataagcacataatgtttttgtataattatgtccaaagactgcatttttatttcctaaatctggaaacccttcctgagggacaaaatcactccagctggcactagccagtgcccttgtgagtttttgacacctgtttcaagaactcacaccaggctgggggctaaggcggcagatggggaagttgtggcaggggcggaacttgccccagcctggcagggggaggggtgccgtcttgcgggagtgggacaggcaggcccaggagtgataagcgtgaactagagagtgctgtgcaggaggaagctggggccgccgtcgggccttctccctccaggggcccaagagccactggtactcagtgtctgggtgggggcaggggggatttttgttctcccagcacctgcggctgttgagaccagagaagctggtggtcgaccacagcctggggtattagttcacccctagcttctccccagcgagaccccagggcccttgggcacaggggattaagcctctatctgcttacgtgcaagcggaagaaataggcccagagagcaacagtggcgggtctgcagtcacacagccaacttgcgcttgtggcagtggcaaggttggtgagtatctgagtcttcaggccacggcattttccgctcgagtggagcctggtaagtggcctctatttctggtacattctctgggagcccccagtattttccagacagagggcactgaagacaggctttgtgctgaggatgggtcacctgaggtccagctgctcccccgtactcctccagggaagggctgggaccccttctcctgcggctgcccctaagaggacagattgttgcttctgtgggatgaggagaggcaatgtggcatggtggttaagcgcgtggacttggagccagacggcctggggctgaatcctggctccgcctctcaccaactgtgaccttgggcaaggtacttaaacaccctgtgcctccattcttaatccatgaaatgggcatgatgaaatgacacctactccgtagggttgttagaagaatgaaatgaattagtaagtgctcagaacagtgtgtggggccgggcacagtggcacatgcctgtaatcccagcgctttgggaggccaaggcaggtggatcacttgaggtcaggaatttgaaaccagcctggccaagatggtgaaaccctgtctctactaaaagtacaaaaattagctgtgtggtggcccatgcctgcaatcacagttactcgggaggctgaggcaggagaatcacttgagcctgggaggtgggggttgcagtgagctgagacagcgccagtgcataccagcctgggtaacaaagcaagactctgtctccaaaaaaaaaaaaaaaaaaagaaagaaaagaaacaaaaagaaaagaagaaaaccagtgtgtggcaggtacgcaggtagtaaggtttacttttcttctagtgacatttactgtcttccttaggaagctggttcagtggggctgtcgaccacaggtaccaaccctgccctcccctacagagtatgtgacgtaggcacagccaatgactgcatcccagtgcttcgaccagtcacagggtcaagggtgagcacgtgaccccagcaaatgagcacatccctggggctggcgtgcagaggctctgggagtaaagcttccttttccctggccaggtgcagtggctcacacctgtaatcccagcactttggagtcccaagcaggcagatcgcctgaagtcgggagtttgagaccagcctgggtgaaaccccatctctaataaaagtacaaaaaattagccgggtgtggtggtatgtgcctgcaatcccagctacccaggaggctgaggcaggagaacttgggaggcataggttgcactgagttgagatagtgccagtgcactccagcttaggcaacagagccagactccatctcaaaaaaaaaaaaaaaaaaaaaaaaaaaaaaaaaaaaccgaaaccaaaccaaaacacaaccaaagcttcctcttcccactgtgggtgcagaggcctggggctgtggtcagcatccctagcacatggggcttaaaaagaatgaaaccaacccattgagggttctcttgagtccctggattcaccttgcctgccaggcagaatcctccctggaattcccacagatgtgagacagtgaatctcccagtttgcttaagcaagtttgaatagagttctaatccatgcaccctctgtgccccatagagcaagaggggttcccccaaggcagtccccttcctccatagaccagcgctcttggcctttgttttgatccacctgctgccccgacatccaggcccagcctcacaccgagacactggcccactctcagggaggtgggtcctccaggtctgatgtgattagagctcgcttacaagaggaaacaaacaaacttgtattaaatacctgctgtgtgccaggtattgtgctggggctttgaggttattttagttgtattttacagatgaggaaactatagctcagagaggtaaagtgacttgttcaagctcacacagccaggaagtagaatcgcttctatttgaacccagtctggttccaaagcatccactatatcatatggcttattacttgcaggaggaagattttttttccgtcaaaaatttttgccctttggattttccccaatttgtacatatttatgggttacagagtgacattttgatacacatataaaatatgtaatgatcaggccagacgtggtggctcacacctttgatcccagccctttgggaggccaaggcgggcagatcagttgaggccaggagttcaagaccagcctggccaacatggtgaaaccctgtctctacgaaaaatacaaaaatgaacttggtgtggtggtgcaagcctgtagtccccagctccttgggaggctgaggcaagagaatcgcttgaacccgggaggcagaggttgcagtgagctgagattgtgccactgaactctagcctgggcgaagagagactgtctcaaaaaaaaaatgtataatgatcaaatcagagtcattatcatatccatcacttcaaacgtttgtcatttctttgtgttgtgaacattgaaaatctcttctagctttttgaaaatatacaataagccatagttaaccatattcaccctacagtgatgcagaacgccagagcgcgttcctcctacctagctgaaatttgtgtgcattcaccaacttctccctatcctcccctccctcctccccttcccagcctccagtattcaaaattctactcgcttcctccatgtgctcaacatttaaacacagattttaattgtggtacaaagcacacaaaagttaccattgtgggggcggggggggggcggtgttggctaaaattgaaaaggtagcagagtacctctcagtcaaaagatgacctagagagtccattactccgagtacatagtacccctggaaaataggggttaggtctcattcatgcattcaacctgctaggtgccaggcagtgctcaaggaagggcctgactgggatgagaccaatgagggctccaggtgcagagttgaggatggtgctgcttcacaggtgatgaccctgcctgtgtatgactctaagagtgactgccatcttccatcctactcctggggccgagcctatctccctggagccccagcccccatgcagggtgaaggagggtttagatgacttggcagagtcttagtccagccaggaaaggaacgtcccatgcactacccctgagaaatgactccatcaacagtggtttcaggagcgcttagtatgtgctgggaactggggtggacaggagtgaccacaggcatcccactgctttcagggagctggtggggagaactcaagacagatgatagcacatataatcatttgttaccccacggtgggtgctatgaaggaaagagccaggtgctacgagacgggagtgaacaggggccgggagcctcacttcccatctggcgagacttcctcaggttctgggacccagcttcacagggcccctcgtcctcccagctttgaagttcttatcattggtcccgctcctcttgttcttccagacgtgtgaagagggcctgctctgtgtcattatcaacttgcaataacttagtgtcccatttcatctttttggttctcgatacctgcttcacagttcacctattatgttttatcgacagaagaaccagtctagctgggttcggtggctcatgcctgtagtcccagcactttgggatgctgaagtggggggatcactttagcccaggagtttgagaccagcctgggcaacatagtgagtctctgtctctactaaaaaaagaaaagacagaaaaggagaggaaagaaggaaggaaggaaaggaaaggaagaaaaagatagctgggcatggtggtgcacacctgtagtcacagctactagcgaggctaaggtgggaggttcacacgagcatgggaggttgaggctgcagtgagccacagtagcaccacggccttccagtctggatgacagagacagaccctatctcaaaaacaaaaacaaaacaaaagaaccggtgtgctctgtctcttgactggaccgactggcacagacttgctggaacactggtcacccaggcaaagagcccaggtagagcgacctgcgtggtcaaaagccaggaggctggaaggagtgagggacatttccggagccagaggccacagtggccagaggggagtgaaaggggtgaggttgggctcaggaatgggcacctcatgcaccctgagctgatgagaaccagacttagggcttttattggaactggtgggttaggagatcctctctcttgtggatgtgaagccaggagaaaggaaagctgcagctatgcagggctcctgtgggagacagcctgcctggaggtgaggcccatcccaagggagggagagtggcgagatgaagaaagactaagtcccaatgacattgttggagccccttgatccagctgtgactgtggccctgggttttcagttacatgaggggataacctccttttttttctttttctttttttttttaagacagagtcttgcactgttatccaggctggagtgcagtggtgcgatcttggctcactgccacctccacctcctgggttcaagcaattctcctgcctcggcctcccaagtagctgagattacaggcatccgccactgcacccagctaattttttgtatttttagtaaagacagggtttcactgtgttggccaggatggtctcaaactcctgacctcgtgatccacccgcctcggcctcccaaagtgctgggattacaggtgtgagccaccgtgcccggccaacttccctttttttttttttttttgtttgagatggagtctcactatgtcaccaggctggtgtgcagtggcgtgatttcggctcactgtcagctccggctcctgggttcacgccattctgcctcagcctcccaagtagctgggattacaggtgcccgccaccaagcctggctaatttttgtatttttagtagagacggggtttcaccatattagctaggatggtctcaatctcctgacctcttgatctgcccgccttgccctccgaaagtgttgggattacaggcatgagccaccgtgccctgtcccccaacttccctttttgattaaaacagattgaggtgacttttcttctcacttgtaaccaaaaaaattccaaatcttttggcactccataaatagcagtcatgatggtgaagctggtggggatgataaggaggcaagtttgtttttttttaagacagtcgtgctctgtcacccagaccatggctctctgcagccttgacctcctgggctcaagtgatctcctacctcagcctcttgagtagctgggtctacaggcatgggtcaccatacccagctaattttttttttacaggcaaagtctcactatgttgcccaggctgatcttgaactcctggactcaaacaattcttccgcctcagcctcccaaagtgctgggattacaggcatgagctactgctcccagcccaggaattggaattttttagggcatctggagaggtgaaaaagggggccaacaggctggatgctgcaggaaggaaggggaaaggaagaagggttggtttttctggattcaaagtgtctcatcttaactccaaccctggactttaaaaataatgttatgcagtggaacctttttcctgttgattccataaacattcagcaaagaatataagatgattaagtgctggttgtaaatgacctccagcaacggggctgggttttgcatccaggtcactgcagggctgaactagaaaaggttgtgttgggtaacccagcccaagattcaatcttaatcggtctaagccagtggtggcattcctagcctccctcccactgattggccgggaagggcatatgacctagtgctgacccatgagaggtaaggagagttgccggaagccttcttggatgacctgtggccacaggaacctctcttttctgtaagttgcaatatcccttagggtagtcactgaaaatcttcatgtttgaccatcctctgcctttcccaagttgaattttgctcagtttcatccaaacaacgactataactcagggttgcattcaacatatttaacaaccgagataacatggaccctgactaactaatagccactggccacagactgcaggccatatggtaattaccagctggatgtcaaccccaagtctgctccctattatgggctgcatgtagttggctcctggggatacagagataaattatgtgcatttactgttctcaaggtgggcagtctggtagcttctgtaagaaaaagtaggttaggtctagaatgccaatgtttcgcattttccctgtaaatctcaggttctgaccttggctgacattagggtcaggggggagcttggcccaggctgattcagcagatctggaggggcatgggcatgtatgtttaaacaaagtcccagttgggaacctctgctttcagctatccattcagaggccgagttcagcggccagacgttattcctgagcctcctggctgtcatacagcgaacgacctgactctctgtaggggcgagactagcccattcagaggtgcgtccttcctttttctttagaagggagcaagtgtgtaaaggaggaagaacaagggtgcacttctggggacaacataatgtcacagaaccagggaaggaatttcatggcccctagaaaactcaataggcaagaggatgccatagtcgaatggaacctctattaaccccaaagtcagacaggaccagcccatgggtgctcagggcactgtggcacaaacaaggccggcctgctggataaagggaggtagaaacgctttcagccctccccggtgcttcccggtttataacttcatctactcgtgacacgtgggggtccgccgccgccactggcagggtgccttgagtgcttgagttttcgcccccagcacaggtggagaacccaactcccagaaaacatctggggcggaaacggaagcatggccgcagcggtgaacgcactgcattctgggaaatgtagtcgaaacggccgctggggcagagtgagcacccacagtggtgccttctggggagggtcgttttcacgtagtccaagagccaggggtgggaaccgcggggctctcaccccagcgccgggaggggatgaacaacttttggattttgaatttaagtgtaggatttcgttttgtcaatctccaaccctaacacccaaggaggcagagaataagagcaatatacacttctgtgatgccattcatgtctgcattgattatttctccgtcgaacttgagtaaacaggcagtttaacctcccaagcatctgtaaagtgggcatattaataattcccacttctcaggcttgataacgtcaatcaggtaactggtacagtgcctgacacaccttcattgccctcttctcttggaaccagtggagcctacaaagcaaacagatgtgctttgtaaccaggagtatgaattctgctccaggagagcacgggggactttgtcatattttgggagttgtaatttcattaaattccagccaaaattcataggcaaaaacgtaaggaaatcttgtcacataaagggattcagcaaaggtacaccaaccaccttgctagccaggacacagtgagatgaaagttaaaagcatatgacaagcttctgggtcaagcattctcaaacagtactagcgatagtattaatgggtttatcctctataaagagtaatttggcaatagctttcaaaattacaaaggcatatatgtgcagcttcagtgattccccctctaggaatttctcctgcagacatactccaagattttcaaaatgacaaaagtttaagaatattaatgggactgggcgcggtggctcacacctgtaagcccagcactttgggaggctgaggcgggcagatcacttgaggttaggtgtttgagaccagcctggccaacatgttgaaaccccatctttactaaaaatacagaaactagcctggcgtgatggtgggtgcctgtagtcccagctacacgggacactgaggcacaagaattccttgaacccgggaggtggaggttgcagtgaggtgagattgtgcccctgcactccagcctgggcgacagaggaagactctgtctgaaataataataatattattaatggtagtattgttttttaaataaatgattggaagtcatctacacatctgtggatagaggatgagttacatcaattgtgatgtatccatatactggaataccatgcagccatttaaaataataaggtgcaacatcatctatataatattcttgcaaaaaaatgtttaacctaaatctattatgaggaaagaaacagaaattcaagttaagagagatttgcaaaatgcctggacactcaaaaatgtcagtgtcataaaagacaatatggactggcggactgttttagattacagtagactagagacatgactgttaaatgaatgactttttttctttccatttttttttgagatggaatcacccaggctggagtgcagtagcgtgatcttgggtcactgcaacctctgcgtcccaggttcaagtgattctcctgcctcggcctcccaagtagctgggattacaggcacctgcaagcacactcagctaatttttgtatttttagtagaaacagggtggccccatattggccaggctggtcttgaactcctgacctcagatgatccgcccacctcgacctcccaaagtgctgggattgcaagcctgcgccaccgcacccggccaaggcccttagtttgagatagcctggccaacatggtgaaactccatctctactaaaaatacaaaatttagctgggcttggtggcacatgcgtataatcccagctactcaggaggctgaggcatgagaattgcttgaacctggaaggtggaagttgcagtaagtcgagatggtgccactgtactctagcctgggtgacagagtgagactttgtctcaaacttaaaaaattaaaaaaaaaaaaatgaaaaaagaaaggtgcagagcagagtatgcagaatgctgcatttttgtggaaatgctcaaagactgagtctgaaaggagacacaagaaagaggtgactaaggatgtctcggagaggagaactggtttgggggaggggacattaggggtaaacaggggacttcttgcacttaccccttgagaccttttgaatggcatgccatgtgcctgtataaactattcaaattgcaaaaaaataacttcaaagaagactgtttctgggaaagcacttgtggtcagaaaaccccagactcggatctcctattccccatttgtagacttgatggtaaacccaaacagaaggaaggaaagccagtgactttcatatctgtttccacatcttatcctcattacaaccctgtgaaccagttaggttttatcgggcacatttgacagattaggaaaattgaggctcagagaggctcggtgagatgctggcagagctgggattgaaacagtcttgactatgactgtacctggctccttccctcctgcaggggacctctccaggcactgaggcctgtggcggggggtggcaggagagagctcagggtggaagatgtgggtgaggtttacttccaggctgtggtgctcactaaagctcctttccactgcgactttcacaagggggcccctcagtcaggaaacagcagtctaggatgccgggcagccaaaccagggtttgatttacatgttctcacactactggttgggtggtttatttgggaaggtaggagctaactcagccaaagatcctgttctctgaacccatctgggttgctttttaacatctctataatccctgaagatgtagattttaaaaaatcacttgattgatttttgtcaaattatatgccttaaacaaactaaactttttcattaaataaattatattttattttttatttttttgcgatggagtctcattcactctgtcatccaggccggagtgcagtggtgtgatcttggctcctggcaacctctgcctcctgggttcaagcaattctcctgcctcagcctcctgagtagctgggattacaggcgcctgccaccaagcccagctaattatgtgtatttttagtagagacgaggttttaccatgttggccaggcttgtctcaaactcctgacctcaagtgatccatccgccttggcctcccaaactgctggaatgacaggcgtgagccactgtgcctggccttcattaaataaatttaaagaaatagatgagtgttaccaattcaagcaatgaagtatttggagggcaatttggtgtttctgtcaaaattgttttggtatgtgtccagcatttacacagcaaatgatttatctttccctgtggatatactcaccccactgttcaaggatacatgtccaaagatgcattgcttatgaagcaaagacacaaacctagaaagagctgagatgtccctcaatggacagctgcttcacttaagtgtaatccatctacgcggcggaatgcaaggtaccatggttgagaaaaagaaagctggctggatttgctgacctagaaagagatctgcaatataccgttaagtaaaaacaacagtagaataatatgatcccattgtgaaaaaaaaaaagttaaaaacacatagaggtatctatgttttagcaaacatagaaaacaatgtataagatccagcaatttggctgggcgtggtggctcatgcctgtaatcccagcactttgggagaacaaggcggacagatcacctcaggccaggagttcaagaccagcttggccaacgtggtgaaattccatctctgctaaaaatacaacaacaacaacaaaaattagctggacatggtggcgggcttccgtaatcctagctactcaggaggttgagacagaagaatcccttgaacctgggaggggaagattgcagtgagctgagatctcaccactgcactccagcctgggtggtgatagagtgagactctgtctcaaaaaaaaaaaaaaaaaaaatccagcacagcaatcccacttctggatatttacccaaaagatttgaaatcagtttgttgaaagatgtctgcactgtcaggttcattgcagcatcattcataatagctgagttatggaatcaacctaaatgtccatcaacagattaatgcataaagaaaacgtgccacatatttacaatggactactattcagcatttaaaaagcagaatggggactggagattttttttttttttttttttttgagatagagtctccctcttttgcccaggctggagtgcagtggcgcgatctcggctcactgcaagctccgcctcccgggttcatgccattctcctgcctcagcctcccgagtacttgggactacaggcgcctgccaccacacctgcacctggctaattttttgtatttttagtagagatggggtttcaacatgttagccaggttggtctcgatctcctgacctcaagatccacccacctcagcctcccaaagtgctgggattacaggcgtgagccaccgcacccagcttttttttttttttttttttttttttcaaacagagtttcactcttgttgtccagactggagtacggtagtgcaatcttggctcactacaacctccacctccagggtttaagtgattctcctgcctcagcctcctcagtagctggtattacaggtgcattccaccatgcccagctaattttagtatgtttagtagagatggggtttcactatgttggccaggctggtctcaaactcctgacctcaggtgatccacctgcctcagcctcccatagtgctgggattacaggcatgagccactgcctccagcctggaactagagattgatggccagggaaattctgtcatttgcgacaacatggataaagatggagaacattatgctaagtgaaataagccaggcccagaaagacaagtgtcacatgttctcacttatatgtggaatctaaaacagtcaaactcatagaagcagagagtagaatggtggttacagaggctcgaggacgggaaatggggagatggtggtcaaagcatacaaaatctcagataggaggaatatgggttttttttgagacctattgtatggcgtggtaaatgtcattaataatagagtatggtacatttcaaaattgctaagagagtaaattcaaacagtctcatcacaaaaaagttaagtgtttgaggtgatggatatgttaactagctttaattattccacgttgtattcatagatcataatgtcactttttaccctataaatatgtaaaagagtccgggtgcagtggctcacagctgtaatcctagccctttgggaagtcacggtgggtggatcacctgaggtcaggagttcaagagcagcctggccaccatggtgaaatcttgtctctactaaaaatataaacattaggtggatatggtggcaggcgtctgtaatcttagctactcgggaggctgaggtgggagatttgcttgagcctgggaggcggaggttgcagtgagccgagattgtgccactgcgctccagcctggccaacaaagcaagagtctatctcaaaaaataaatataaaaaaaatataatatatgtatataatatatataaaagagctaggatttgaacctgcaactcttcactgtgatgtaggccccgtctatcacgtatgaactatgagcctgctgagtgctgggtgctgagctgggagctcccactgttccccaacactgcgtctcagagttccctgatgctggaagcctggaggccctcacaattctagggtgtttttagaatatcattgtggggtgaaagcaggttccagcttccccaggtggaaggttccaagaagcacccggccagctctgagaagtacccggccagctcctccactctgcctgacagggaggggactgtgagggttgggacacgtcctcttttaaggctctctcttgctggcttctgaccacttcctctttttcctggggtggaggcggctggccgtggcagcactaatagcagctgggggcggagcaggcctccaaaaaccctcccggagtggctcagcccctcggctgagggcaggagagcaagagtccacttcagcttccatctgaggtctctgtgagcccccaaaggaggggctgggagaggtggtccccttagctccccctccccagccagaacagaatcactgaccctgaggcttggcctgggctgcatctgcttccagcaacttccatgaaggacgtgactgtagacgaggcccactccttgcacggccagggccctcagggtgcccagggaagtgagggccagtgctggaagctccagcctagcactgggcacctccccggtgagtggctgttgggggcagagctgccagcagggagaggacagctatgaaagacgtggctccaggccttgcactgccacctgtcaactcggggctttgggcaggctgcttttctcctttgggcctcagtttcctcatctgtgtagtggagaccaaccacggtacttcgaaggtctgtagaaattcctggtacacagcaagtgcttaataatggtatgagctactattagctagtgcctgtggctcagtctgagctgtccagggtgccccaccagcttctgctgaggatggccagtggcagctcagctctgctcccggcctcgcacccttccacaccccctcggccctgcctctccccgccacctcagcctggcttcccacctgtggcaggtgcaaccaagctcaggtccacacagcacgagctttagttttcccactcacagccccattgagccaatttggtaaaacatccacattggtcattggtgggttatgccaagttcagcattgtgttaaagtcctggcaggttttttttttttttttttttttttgtattctggttaaatatgtataatataaaatttaccattttgaccatttaatttaattttttttttttttgagatggagtctcactctgttgcccaagctggagtgcagtagttgtatcttggctcactgatgcctccacctcccaggttcaagcgattctcctgtatcagcctcattagtagctgggattataggcgcacattaccacgcccagctaatttttgtattttcagtagagaagggtttcaccatgttggccaggctgacctggcctcaagtgatctccctgccttggcctcccaaagtactgggattacaggcatgagccactgcacccagcagtgctgacttttgggaggggatgagggaaccaggaggtgacagatgccacagccactaatgcagatgccacagccatgactgtaggatggggaaaatatgaagggagctcagccgttttatctccaggagaagcagctggagggctgggagagggcctggggagtgggaagtggctgcggaggtgagactcccccatccctgggccaacagccagggctccatggttgggctagatggtcccaccttgggtggaggctgagcctgtgtgaggcgctgccctgtgtcttctcttgcctggcctggccgccatcacaggcccacccccggggagaagattctaggaggaaagtccaggccaggcctgaaaggacttcgctccttggtaactatccctcagggttgacccagtgacacaggttctagggacccacttctaggtttgccgcctccatctccatctccgtctccacctccacctgagttgagaggggatggagaagcttcctggggaaactctgcccttctccacccatccccacctcctatgatttatagaaaaatagcagatcaaatagagaaactcaagagaggcagaaacgaagaagaagggataagagtgatgaaaaggacggatagggaatacacagagaggggcaaaagcaacaaggccagccaggcaaacatcgcagagagccacagacagtatccagagcacaacaggcacactgaggagacacaaaacggaccaaccgaggaaagaagaaacggagggacacattggagacgccactaaggcccgcggagagcaacgggcagagggcggcaccgcgagaacaccccgcgccgcgacacgaaaggaggagacacccgggacagacaaccggccgaaggaagggaaaagcggcggagaacggcggacgcgcaggagaacagcacgacgcagggaatcggcccagacagaggaaggaccgcaaaggcaaacaggaagggcggacaaacaaacgcgnnnnnnnnnnnnnnnnnnnncattcccctcctttcccatctcctttccatttccttttgcctataccttgtaccaagctgggtggtgatccacttggaaattcacaaagcagtgcacagcacttcacagtttgtcaaggacctggtaaggtgtaggtgctcaatacttgctttagtgaatgaatgactgtggggccccatggcagagctcactagtgggaacctcacgtgtctccctagcaatgtcaaaggcctgtctgaagtatgtgtgggagggatccccaaaagggacaccaataactgctctgggatatttaataaaatatgctatgaagattaaatggaataatgtgtaggaaatgcctgctacattgtaggtattcaaactttagttatcattattatcttttattttaaagaataatctgattctggatcagaagcagtgactcccacaaaggtcatcaaaaagggaatggtgcaaagtgagagaacattggcagaggaagaaccagctgtgtgtccttaggcaaattgcttaccctctctgagcccccattgcctgatctgtcaaatgggtctggaaatcctcacttcctctgctattgtggtaggcatcagatgagataaaagatgagttcagtcttagcaagcagggaagagaagcccagctgagctgagaggtggctgacaatgggaaaccaccccaagcctgttcctttattttttatttttatttatatatatattttttgagacaaggcctcactctgtcacccaggctggagtacggtgccgtcatcgtggctcactgcagccttgacctcctgggctcaagtgatcctcccgcctcagtctcccaagtagctggggctacaggcatgcaccaccatgcctggctaattttgtattttttttttttttttggtagagatgaggtgtcactatgttgcccaggctggtctcaaacttctgagctctagtgatctgcccacctcggcctcccaaagtgctgggattacaagcgtgagccaccaaacctggcttcagcctgtttctttaacgtcagcttctcttattttttgagacagagtttcactctgtcgcccaagctggagtggggtggtgtgatcttggctcactgtaacctctgcctcctgggttcaagtgattctcgtccctcagcgtcccgagtagctgggattacaggcacccgccaccacatgcagttaatttttgtatttttagtagagatggggttttaccatgttggccaggctagtctccaattcctgacctcaagtgatccgcctgcctcggcctcccaaagtgctgggactacaggtgtgagccactgcacccagcctcagcctgttcctttaacatcagcttctgaaactatctctgcagaagttctgagggtacccctcactcaagctccaggcgtcaggaaaagaacattccacgaagtccatctggaagacggtcctttccctgctgcccccaggtaagcacatggcctccaatctgtcctcgaccaaaccctgactccaggccagtcagcagcaccgagcctggcctgtttccatggagaacaggaaaggcaccagcgtgtctgggaggaaagacggcttcctgttcaaagccacagataggatggccataaagcagggtagtagaattgtcattattccgcaagatcaaatagggctgctaagcccaggaaccgtcggggaggcccaatggatgggccacatttcccctgcaaggccaactggcaagtggccactgccccctaccgcctttcagatagggcttcctgtaggagtatgctgctatgccgggctattattgtcagtattcactgagtgcatagtatatgccagtcactgacctcagcgatctgtaagatttatctcctttaatcctcagaacaaactgctatcttatacggcagctattattattaaccccattttacagatgagggaacggaggcagagagaggttaagtatgttgcccaaggtcacacagtggaggagccaagcctgtactcaatccaggtcatctgaaaccagagcttatgaaggtgaccacaccatacagtgtctcaggacaggggaggccaggcacagaggtggtgggggaaagaaggaagctaagtgagaggtaccaggtcccaagtgaacccctcattaatactggtgttgaagaggcgtggacttcgtgaggcgggtgttattggcactgttttacagataaggagctgagagcccagagagacagtgagttgcccaaacaacaaagctgcgtttgagcctagatgtgtctactgcacagcctggctcttcagtgagcttgctgccttatcctgcttcttcagcagtttgttccgagtctgatctgtcttgagagccccacagcctggggcacaggcctggaacacacacaccgcgcctctacgcctgtttttagaaattgtgtatgggattccagtggttcctacttgctgctactttgggcaaaggagaggaaatgtggtaggaagtgtagtgactctgtatcttggtgagtggttgtttgcctgagctcagatgctgctggaatgaagagttttgaaaagacaatcattttggaatagttgcatctcttttacttttgggtgagtcaaaggaaaaagggagctctaggagggaccacattggaaattccatccacccactcatccacccatctgatcattcaatcatctgtttatccaatcattcatccattcatccatccacccacccattttctgggctccaattttctgctaggccctggaaacaaaacacacaaaacccccaaacaaacaaaaaaacaaaagagtaaaagcctcatagaaaaaaaagctgtttagtgaccagcctggccaagatggtgaaaccccgtctctactaaaaatataaacattagccgggcgcggtggcaggtggctgtaatcccagctacttgggaggctgaggcaagagaatcgcttgaatccaggagacagaggtgcagaagagccgagaaagcgccactgtactccagcctgggtgacagagtgagactctgtctcaaaaaagaaaaaagacaagaaaaaagaaaaaaagctgttgtttcacattttcctccagcacttcctattttttacatttggaaaagagctttattgagatataattcatgtatcatgcaattcacacatttaaagtgtgattcgatggcttatagtgtattcacagagcactgacatcatcaccacaatcaatttttgaaacttttcatcacccccaaacagaaacccagtaccccttaggccgtcactccctatacccccttcccccaccccttcaattactcatctactttctttctctgtggatttgcctattccggacatttcatgtacatagaatcatataatatgtggccttttgtgtcaggcttctttcacttagcatcatgtgctgtcgttattgttgctgttttgttttgttttgttttttgaggcactgtctcgatctgtcacccaggctggagcgcagtggtgtgatctcagctctctgcagcttccacctcacgggctcaagcgatcctcccacctcagcctcctgagtaactgggaccacaggcgctcgccaccaggcctggctagatttttgtattattttgcagagatggggtttcgcggtgttcctcaggctgatttcaaagtcctgggctcaagcgatctgcctgcctgggcctcccaaagtgctgggattagaggtgtgaaccctcgtgcccaggctcacttagcattgcattttcaacgtttattcattttgtagcgtggatcagcaaatcgtttctttttattgctgagtaatattccattttatggatagatcacatctggttcatttgttcatcagttgatggacatttgggttgcctctccttttggctattataaataatgctgctgttaacatttatgtgtaagtgtttgtgtggatgagctttcatttctttttggtatttacctaggagtggccttgctgagtcatacagtagctctgcgtttgaccttttgaggaactgctaaactattttccacagcagctgcaacatttactactcccaccagcagtgtaggaagcttccaatttctccatatcctcaccaatacttgttattgtccatctctcttttttttttttttcctgagacagagtctcactctgttgcccaggctagagtgcagtggcacaatctcagctcactgcaacctttgcctcccaggttcaagcgattctcctgcctcagcctcccgagtagctgggattacaggtgcacaccaccatgcccagctaatttttatatttttagtagagacggggtttcaccatgttggccaggctggtctcgaactcctgacctcaggtgatccacctgcctcggcctcccaaagtgctgagattacaggcgtgagccaccgcacccggctatcgtccatctttttaaatttagcctttctagcaggtgtgaagtgaaacctcattatggttttaatttacatttcccaggaagtatctttacgtgttattatcagtcatttgtatattttctttgaagaaatgtccatttggattctttacccactgttaattgggttgtcttttcattattgagttgtaagagttctttatagattctagatactagtcctttatcagatacatgatttgcaaatattctttcctattctgtaggctccagttccttctcattgttttgttttgtttttggtttttaaagcacacatcctcatgctaagatatttgaaaaagccaaaaatgtataaagagatggaaaaagaacctcccacagaccactatgattaatatttaatcttttttatttcccttttaaatatatttacttatgttatttattctttgataggtaatatctgcactgctgcagaattctaaaggtctaaaatcacagattcaatgagtctcccaagcaggaaagctgcattttcaacctgaatagatctactgcaaagcctggctctttcagtgcctctgccaccgtatcctacttcctccaaagtttctttctagtctgatctgtcttgagacccccagtgcctggagcccctgtcatccaaactcctcctagggaccgctactgttgccgctttctagatgatcttccaaggatagcttatagcttgtatatatggacatatacttgtcaaatttcccttaaattgtacgttacccattgcactgagcacttgtccgtagctcctttccagtcttgtagctctgctgagttttctttctatagttaagaatacaatgtaggccgggcgtggtggctcacgcctgtaatcccagcactttgggaggccgaggcgggcagatcacaaggtcaggagatcgagaccatcctggctaacacggtgaaaccccgtctctactaaaaatacgaaaaattagccgggagtggtggcgggcgcctgtagtcccagctgctggggaggctgaggcaggagaatggcgtgaacctggaaggcggagcttgcagtgagccgagatcgcgccactgctcatctatcagttgtaggaggcacagcaggaattcattctagtgttaggaagaatgaggaatttattaaaggacattaggtggcttggagagtctccaggagggcagagatccaggtctggagtctacatagccagaaacaaagcacaaccacaggtgggattgctcgagtagagcagtgcccactgccaggactgggcacagagcatggctggttctgctgggctcagggtgctgcaccctctggttctctccctccagataccaggtgtttctgccactacctttgccagatatgtaccctctgacacctgcttctcttgttggtggcttttggacacaagcctgatgctggtacgtctgactatggggcagagctgagcgtccctacccaagctgcaagggagtgtgggaaaacaagatctggctttttctttggctaggtgtggccttatatggggaggcagtcaaacataggaggtcaaattttgctgggcacccaaaaagaatggcagagcccactacataatacttatatgggctgagcacaatggcacatgcctataatcccaaccctttgggaggtcaaggtgggaggatcacttgagggcaggagttcaagagcagcctgggcaacatagtgagaccccgtctctattaaaaaaaaaaataaaaaaaaaataataataataataattagctgagcatggtggcaagtacctataatcccagcactttggtaggctaaggcaggaggctcatctctggctaggagctcaaggccagcctgtgcaatatagtgagatccctggcttaaaatttttgtttgtttgtttgaggacagagtttcactctgtcacccaggctagaatgcagtggcgtgatctcagctcacggcaacagcgacctcctgggctcaggtgattctcctacttctcagtagctgggactataagtgcgcaccaccacacttggctaatttttgtattttttgtagtaacaaggtttcactatgttgcccaggctggtctcaaacttctgggctcaagtgatcctcccaccttagcctcccaaactgctggccttacaggtatgagccacttgcgcccagctacaaaaatgtttttaaagttagctgggtgtggttgtgcatacttgtagtcctagctactcagaaggctgaggcaggaggatctcttaaacccaggagttcaaggatgcagtgagctatggtcaagccgctacactccagcctgggcaacagggccagaccttgtctttaaagtaataataatagtaatgataatacttaaatgtaagtgtattgtaattatgaaagtgtaattcttctgattataacacggtacatgggtgagaggtgacgcgttgtaatggttaagcttgggcagcagcctgggagctgactgcctaggttagagtcatatctctttccctcggctagcctttcaaacttgaccatggctcgaacttcattatgccccagtttcctcctttgtaaaatggggatcaaaatagaacacccctcatgggttgggctgaggatgggatgagttaacagacataaggcttagaaccatatctagctcattgtatttgctatgtagttgtttgctcttctcatttttccaatcttttattataaaaattttaaaacatacagaaaagtaaaaagggttgtatagcaagcatccatctagtcactacctatgatttcaccctgcacatttttttttttttttttttgcgcatggagtcttgttctgtcacccaggctggagtgcagtggtgtgatctcggctcactctaacctctgcctcctaggttcaagtgattctcctgcctcagtttcccaagtagttgggactacaggcatgcaccaccacgcccagctactttttgtattttttagtagagatggggtttccctatgtggtggctagggttgtctggaactcctgacctcaggtgacctgtgtacctcgtcctcccaaagtgctcagattacaggcatgagccaccacgcatggcccctgaacatttactctgtttgctttgtcacatctgtctatgcctctttccaattattaatgcatgttaattttaatgcatttcaaagtaatggcaaatgcatacatatgttgctattattttttaaaaaagaaactgtcaactgttaaaatggtctgggcatggtggctcacgcctgtaatcccagcactttgggaggtcaaggtaggcggatcacctgaggtcaggagttcaagaccagcctggccaacatgggaatatcctgtctctactaaaaacacaaaaattagcctggtgtgatggcatgctcctatagtcccaggtactcgggaggctgaggcatgagaatcgcttgatcctggtaggtggaggttacagtgagccaagattgcatcactgcattccagcctgggcaatagagtgagactccatctcaaaaaaaaaaaaagtgtataaaattgtctgtattttcctttaacataaggaacagagtcctatagatgaaacagaatcattaggttgaggggagagtgaaaaggcaggccaagggacttcctgacaatgggaaaagcctgagcaaaagaatacaccactgcaatatccccccaagtccccaaggctggctgatcaggcagagccccttcaaatgggcattaaaaatacttgctaatcccaaggttttgggtggccaaggcaggaggatcacttgaggccaggagtttaagatcagcctcagcaacatagtgaaacctcacctctacaaacaaatttttaattagcgggaatggtagcacatgcctgtagtcccagctactcaggagactgaggcaggaggatcccttaagcccaggagttaaaggctgcagtgagatatgatcatgccactgtattctagcctgggcaacagagtgagaccctgtctcttaaaaataattaaatcaacaaaaaataagataaaatacaaaagataaaaatacttgcttgctcagatttgatttagaggagactgaagaagaggccttacagaaggcaaagaaggaaagttccagatgggagaacccagcctctcctccactgccgcagatgattctgctgtagcccagatttgcaagctccactcagcaaaataatctccctgtatcagtcatccattgctgcataacagatgactccaaaatgcagtggcctaaagcaacaataactcagattttctcatggtttctgtgggtcgggtatttgggagtggctgggaagttccagctctctgcaaggtctcttgtccagctgcaggtggatgccaacttgggctggggccatctccaaggtgtcctccctctcacggcctgtgcctgggctgggaagatgtgagcagaggtgaactttacaggtgaggctccccgggcacctctccagcatggtgaggtcagggtagctggtcttctaacgtcatcttggggctcctaagttgtgtgcctcaagccaggcagaagctgtcacacattgtcccttttactacattttattgaggcagctataaaaagttacaaagggggccgggtgtggtggctcatgcctgtaatcccagcactttgggaggctgaggtgggtggatcacctgaggtctggagttcgagaccagcctggccaacatggtgaaaccccatctctactaaaaatagaaaaattagctgggcgtggtggcaggcacttgtaatctcagctactcgggaggctgaggcatgagagtcgcttgaacccaggagtcggaggtttcagtgagccaagattttgccactgcactccagcctgggcgacagagagactctgtctcaaaaaacaaaaacaaaaacaaacaaaaaatagttacgaagttctgaggctgggtgcagtggttcaagcctgtaatcccagcactttgggaggctgaggcaggaggattgcttaagcccaggagttcgagaccagcctgggtaacatggtgagaccccatttctataaaaaatttaaaaaattagccaggtgtgatggtgtgagcctgtatccctagctactccggaggctgagtgggaggattgctggagcccaggaggtcgaggctggagtaagctgtgattgattgagccactgtactgcaccctgggggacagagtgagatcctgtctcaaaataaataaataaataagtaataaaaagtgaaaagttacaaagatctggcagattcaaggaaaggaaacctggaccccatctctccatggacgaatgtcaatgtgacagtgtagaagagcatgtgggatggaggaagaatcaggggatgtgtctttggaaagtgcaattgcccacagctggcatctgaatagattcactctcctcaaaggcacttttgcgacattgatcactggccaagcatgccccgtgcaggtctcaccctccagcccatgcagttgtctttcagccacaggctgaacactggccatcccagctgtgtcagaggactttggcaagcctaattttctccatcttttttattaccttgtggaccaggttgaacagtgtcccccaaatttatgtccagctggaacctcagaacatagctgtatttggaaagagggtctttgcagatgtaatcaagttaatatgtggtcatactgcattagggtacatcctaaattgatgaggctgggtgtggtggttcaatcccgtaatcccagtactttgggaggcctaagtgggcagatcacttgagctcaggagttcgagaccagcctggacaaaactgagaccctgtctctacaaaaaatataaaaaattagccgggcatagtagtgtgcacctgtggtcccagctactcgggaggctgaggtgggagcattggtttagcctagaggtgaaggccgcagtgaaccgtgatcaccccattgcactccagcctgggtgacagagtgagatgagacactgtccccccacaaaaaaaataaatcaatgactggtgtgtcataagaagagggacatttggacacagagacatgcacagagggaagatgatatgaaggcaacacagcgacacacagggagagcaccatgtgacaactgaggcagaggatggggagaggcatctgcaaaccagaacacacaaaagattcccagcaaccacccaaagcttggagagaggcatgggacaatctcccgcagagcctccggaagaaagcaaccatgccggccaggtgtggaggctcatgcctgtaattccagcactttgggaggcccaggagggcagatcacttgaggtcaggagttcaagaccagcctgggctacatgatgaaaccctgtttctacataaaatacaaaaattagctgggcgtcatgatgggcacctgtaatcccagctacccgggaggctgaggcaggagaattgcttggacccgagaagcagaggttgctgtgagctgaggtggtgctagtgccctccagcctgggtgacagagtgagatgagacactgtccccccacaaaaaaaataaatcaatgactggtgtgtcataagaagagggacatttggacacagagacatgcacagagggaagatgatatgaaggcaacacagcgacacacagggagagcaccatgtgacaactgaggcagaggatggggagaggcatctgcaaaccagaacacacaaaagattcccagcaaccacccaaagcttggagagaggcatgggacaatctcccgcagagcctccggaagaaagcaaccatgccggccaggtgtggaggctcatgcctgtaattccagcactttgggaggcccaggagggcagatcacttgaggtcaggagttcaagaccagcctgggctacatgatgaaaccctgtttctacataaaatacaaaaattagctgggcgtcatgatgggcacctgtaatcccagctacccgggaggctgaggcaggagaattgcttggacccgagaagcagaggttgctgtgagctgaggtggtgctagtgccctccagcctggatgacagagtgagactcggtctcaataaataaataaataataaagaagaaaccaacccttttgaccccggggtctcagacttttagccaccacatcagcgagttatggtgtttgttatagcagctctgggaaactaatgcatgttttcagtgacattttagccccttctgaatggtctggatggctggttgacagctaagttcagacccgatgcaaaagcgcagtctatgtaggaatgtcccctgtggacagctgctgtgtagccaaggtgggttacatactaggaaagggccctgggggcccccacagggagctaactctattgacgggggacccaggtaacagatgcaggcatttgctgtgagtcacaagacactgatgtgtgtttgcttgcttgggtatttttttactttttgttttttaactttgtaaatgaggcttagccttcccaggtgtgtcctacctcttctgtctcctgtctcccatctctgtgtcctgtctcctggagctggtttgattttgtcaacatgggcactgtttatgatggcaacagctgtgacctttagagtcaagaggaaatccacctacagggactcaggcctttctctccaagtggggccataaactgttattcaccaaaacatgggggaggcataggagggaaacacagccgctcctaggggaagccactctgtttctcctctgcagggctggagacacaggtggacacctggctgtgcccccaaccctgccctcaagctctgcaccattttgtaaccctcaaaagcaatcaggcctctgtacttgctgagcccactgcctgagaagtccattttccaggccctcacttagccagcgcctcctcctcctcctcttcctcctcctcctcaggtcaccctcctccaagaagcctttgtgaccaccacacaaaaacccagcccttcctcccccattatattcatctgctctgctaaagtgctcaccccactggaaatgatcttgtttatgtgtttccttgtttactgtctgtcttcagtagaatggaagagccatcggtattttgtctttttttccccttgtccattcttatatcctcagcttctagaacattccctggaacacagcaagtgttcagtattgttcatggagtgacagatgtctcagccaagaaggtacaatcacagggaagaatgacttcaactggtcttgacttcaacctgcttccagcctggttcccttctcccacctccctacagcccacagaagatcttttccaaactggaagtctgtccaggtcattcttctgctctaaggctttcagtagctcccccttatccccaggaggaagtccaaatgccttaacaagtgtcaaggaacacttggtgagccctgctttccttgctagtcactcgtgcacagctgagtctttccccagagtggatgtcattcatgctgttcccattgcctggattcctgctcctctccaccccattcaactgataaactcgtggtttttttttttttttttttttttttgagactgagtctcgatctatcacccacgctggagtgcagtggtgcaatctcggctcactgcaacttctgcttcctgggttcaagagattcttgtgcctcagcctcccgaatagctggggttacgggcgtctgccaacatgcctggctaatttttgtatttttaatagagatggggtttcaccatgttggccaggctcttctcaaactcctgacctaaagggatccccccgccttggcctaccaaagtgctggaattacaggcgtgaaccactgtgcctggcctcaactgatacactcttgtccttttactaggctcagcttagggaccgtcacctccaggaagccttcccaacctgcactgatcacttcttcttcttctctttgggattatcacttgtattgtaataaaatcttgttttttttctttaaaaaatattatttgcattcagcaaaattcaccctttttgatatacagttctgaggttttttttagttctataagttttgtcaaatatgtaaagttgtaatctccaacacaatcaaaatataaaacaatttcctcacccctccccaattcccttatgctcttttgtatccaacacttcttcccactccagcccctggcaaccacggatttgctttctgtctgtacaacactgcctcttccagaatgtcatatataaaatcacgctgtttataacctttaatgctggtgtcttttgtggggggagtcggtgagggagtgggacgaagttttgctcttgttgcctaggctggagctcaatggcacaatctcagctcactgcaacctctacctccagggttcaagcgattctccttcctcagcctcctgagtagctgggattacaggcacccgccaccatgcccacctagtttttgtatatttagtacagatggggtttcaccatgttgaccaggctggtcttgaacttctgacccacctcggcctccaaaagtgctgggattataggcgtgagccaccatgcccggcctaatgctggtgtctttcactcagcttagtcatgcatttgagattcagccttggtcttgtgtgtatcaataattactttttatagccgagtgctacttcactgtatgaatgtttgtttatccagtcacaaatgaaggacatttgggttgtttccagtttgcagtgattatgaatgaaactactgtaaacattagtgtttttctgtggacatatgttttcatatctcttaggtaaatacaggtgagtttgctgggtcatatggtaagtgaatgtttaactttttaaagaaactgcccagctgttttccaacgaggctgcactgttttgcatttccaccagtggatccacatcctcaccagcactcggtgttatcctcagtttttttttttttttttttttttttttcccgagatggagtttcgctcttgttgcccaggctggagtgcaatggtgcgatctcagctcactgcaacctccgcctcccgggttcaagcgaccctcctgcctcagccttccgagtagctgggattacaggtttcccccaccatacctgggaaattttttgtatttttagtagagatggggtttcaccatgttggccacgctggtctccagctcctgacctcaggtgattcatgcacctcggcctcccaaagtactgggattacaggtgtgagccaccgtgcccagcctattgtcagtggttttttattttaaccattttaataggtgcgtattttttgttcaaccagttggtcttccccagcagcctgggactcctgacagagaataaatctttcatctccttatcctcagagcctgtagtagtaactgacatgtggtaggtgctcaagaaatgctgtgggctgattgaatgagtccattcatggaatgaatgaatttcttgactgcatgaatgagggttctattgaaacagtgcttaaggtaagtttgtctcagatgccatgtgagtttctctgctcccccacaaaggaactcaccatgagtgatgagctggtctttctgaaatggttgccgcaggtaaaacccccttaccattacgtctaatatcttcctgtatctgcccaaagtgcccagactgcttctacctctgaacaggcttgcctgggtttcttccctgttgtttcagtgaaaggcactggtgcccatactagagggtgcaagagaatgatagcggcgggcggcagttaaatgcggatccctaggccctgcccctacgttctgattcagtaaggccaataactcccggcgcatctcagacttttctaaggccccccaggagaggtgagagtcctctgtagaagtgtaaataattctaggtcttgaaaaagacatggggccgggcgcggtggctcacgcctgtaatcccagcactttgggaggccgaggcgggcggatcacgaggtcaggagatcgagaccatcccggctaaaaaaacggtgaaaccccgtctctactaaaaatacaaaaaaaaattagccgggcgtagtggcgggcgcctgtagtcccagctacttgggaggctgaggcaggagaatggcgtgaacccgggaggcggagcttgcagtgagcccgagatcccgccactgcactccagcctgggcgacagagcgagactccgtctcaaaaaaaaaaaaaaaaaaaaaaaaaaagaaaaagacatgggccttcagattctagttctgccaccactggtggttcacacctgccggtcgcttaatgcctctgagcctcggttttcttatctgtaaagctgtcctgaaagtaatggagcttcccagttccactgtgaggatgaaatacattgactgcacgaagggccctgatgcaaggtagatattcaataaatgttgtggattttggtaagccaaaaagattccaaatgctttctctccacccccttcgctaactgccttatattttaatttttattgatgcataacaacgcagagaagtgtacagttcactggatcttcacacactgaacacacccacgcccacatcacccacaccccaaccgagaaaccagcacccctcaggactcgcctgggtgctgctcatcaccaccttcccaagggcaaccgttctgactactagcagccttgtttttgaaacagttttagttttctataacaactaagacatgcatagtaaagaatatttagaaaacaatgacaagagaaaagtcagagacatgtgaacatattgaacagcctttaaaaaatattaattttttggcctggtgtggtagcacatgcctgtaatcccagccctttgggaggcttaggtgggagagtcgtttgagctcaggagttcaggaccagcctgggtaacacgatgaaaccttgtctctataaataaatacaaacatctagccaggcttggtgatgtgtgcatgtagtcccaactacttgggaggctgaggtgggaggattgtatgagcccggcggagggggcagaggttgcagtgagctgagattgcgccactgccctcctgcttgggctacagagtgagaccctgtatcaaaataataatactaactttctgttgaggtataacgtgcataaaatggcccagatcaggccgggcgcggtggctcacgcctgttatcccagcactttgcggggccgaggcgggcggatcgtgaggtcaggagatcgagaccatcctggctaacacggtgaaatcccgtctctactaaaaaaacaaaaaattagctgggcgtggttgcaggtgcctgtggtcccagctactcgggaggctgaggcaggagaatggtgtgaacccgggaggtggagcttgccgtgagccgagattatgcccctgcactccagccttggtgacagagcgagactccatctcaaaaaaaaaaaataaataaataaataaataaaaggcccagatcataagtacagagctcagtacattttcataaagtgactaacccatgtgaccacaagatcaaaacctagaacatcgcagccctcaaggtccttccttctgctgcctccaaggcagtgagattctctattctgacttctttttgtgtgtgagaaaaagtctctttctgttgctcaggctggagtacactggtgttgtcacagctcactgcagccttaaacgcctgtgctcaagggatcctcccatctcagcctcccaagtagccaggactattctgacttctaaaagcactgatgagttttgtgaaacacagccttgttttagacaaagcttccctctctctggtgctgttggagaactcttgctcatccctcaggacccagttctgaggttacctcctctgagaagtcttcgcagctccatgaggcagaggattagcccttgcctgatttgtccctctaattcagctcttgccattctgtgatagtaaatgcctcttcctgctgtctccccattgagaggtaaataggtctaatctatttgcctaatatagggtacagtgggttgaattgtgaccccccccaaccccccacccaaaaaaaacaacaacaaaaaaactaagtcctaaaccctgcacctgtgaatgtaaccttacttggaaataaggtttgtttttgtttttgtttgcttgtttgtttgtttttttgagttggagtctctctctcttgcccaagctggagtgccagggcaggatctccgctcactgcaacctccacctcctgggctcaaatgattctcctgcctcagcttcccaactagctgggactacaggctgtgcctctacgcctggctactttttgtatttttagtagagacggggtttcaccatgttggccaggctggtcttaaactcctggccttaagtgatctgcccacttcggcctcccaaagtgctgggattacaggtgtgagccactggtgcaaggctggaaatagggtctttatggaggtaattaagttaaggatctcaagatgagaacatcctggattcagggtggacactcaatcagaggactggtgttcttaccagagaaaggagaggggtatttgagacagagagcagagggccatgagaagacagaggcagagttagagtgatgcagctccaagccaaggagcgcaggatcaccaccaaccacagaacccgggagaaaggcgtggggcagattctcacctagggcctaaggagggaaccagtgctgctgctggcaccttgcattcagacttctggcctccagaactgtgagatgatatatctctatttttttttaagtcaccaagttcatggtaatttgttacggcagcctttggaaggtaagacacggggcctggtattaaataagggctcagtgtttgtccaatgaatgaaaggggccaggcacggtggctcacgcctataatcccagcactttgggaggccgaggtgggtggatcacctgaggtcaggagttcaagaccagcctggccaacatggtgaaaccctgtttctactaaaaatacaaaaaaaaaaaaaaaagctgggtgtggtggtgcatgcctgtaatcccagctactcgggaggctgaggcaggataaccagggaggtggaggttgcagtgagccaagatcatgccactgtgctccagcctgggcaatagagtgagactccatctccaaaaaaaaagaatgactgaaaaggctaagaaaggaagcttggcttgctggtctgtggtgggaacaaaagggagaccttcggatgccttcttgctctgtgccagctgcctggtgcagcctatgaccactgcaggaccctgcagactgcctgcctgacaccatctccccttgcccctgccgacagctgccctgtttggccacatactcttgggcatcctctcatgatgtgggggaagctgatccatcctaaatatactgccaaatgtggaaaatcccattttcttggagagtgactgaggcagagcaggctttgtgacccatttctggccaatgagacagagggaaagcatgctgggtgtgggggggcgttgggaaaaggtgtactcttttcagtctcttccctttcaggtctggttgccaggagtggcagatgtggaaataatcggtgtccctgttgacacacttgaacttctcagtgtaccttgtctgcaccccaaccactcctgggcttccagcaatgtgagatcattgatagcctttttgtggaagctgaatacgtcctagtggagactccagacatgagaacgaggggcttttgtcttcagcagtgcagattgggaaactgaggctcagagactattacattgttggagacacaggggggtaagaggcagagctgggattcacactgaggcccacctgtctctgtgtcccatgttttcagctgctcttgtacactattgctcttggctttcaactggctgtcttgattttacatgaggtttggggcctggcaaatgcctggttgcagtctggttcttagcataacagggtccgcatgttgagagttcattgcaatgtagtgactactgagtcagctccaggggtcccatctaaccaggatccatgcccaggacttggatatgcgttcgcagactcactcctccacagcagccctatttaccaaagaagaaagtgaagcttacagcggctgcaaatgctgtgcagagctacagagagtgagcgactgggactggaaccagctctgtctcactccaaagccccctttttgtgttcctccaactacactctgtgcccatcatgcaggactttgatggttgctgctatatccctggagcctgggagtgcctggccccttgcaggcactccgcaaatgtttgttgaatgaataaatgagctccaccaggactccaggttagaggtgctcaaagcaaaaccatgggtcgggcacagtgacttatgcctgtaatcctagcactttgggaagctgaggtgggtggactgccagagctcaggagtttgagatcagcctgggtaacacggtgaaatcccgtctctactaaaaatacaaaaaaaaaaaaaaaaaaaaaaaaaaagccaggcgtggtgatgcacgcctgtagtcccaactactcaggaggctaaggcacaagaatcacttgagcccaggaggcagaggttgcagtgagctgagatccaaccactgcactccagcctgggcagtaaaaaaaacaaaacaaaacaaaacccacaaaaccattaaaccgggggctccaccaagctggccacaatttaaatagcagaggggtctgccctcccctacctccagaagcagtgaggcctaaccccattgaaagcccattctgggtggtacttcctctcacagaggcctgccagccagcagctgggactcggctcgtcgccacggatgtgtgcttctctgaacaatgttgggaaaggaaactagactcaagggctccagggggttttctggtcattttggctgtgggggtagaggggtagggttggcgaggttccctggggcagggcggtggacctcagcctggtcactgcctttggaggtggtggtggaggaggggaaaggaggtctgggtttgaaataaccctctaagggtgtttttttttttttggtcagggtcttactctgttgcccaggctggaatgcagtggcacatgatctcggctcactgcctgcaacctctgcctcctgggcttaagtgatcctcttgcctcagcttcccgagtagctgtgactcaggctcactccaccaggcctggctaatttttaaagttttttgtagagatggaggtctcatcatgttgtccaggctagtcttgaactcctgggctcaagtggtccaccctccttagcctcccaaatagctgagattacaggtatgagccaatgtgcccagtccacagatatttttcaaaacagctttcttgagatataattcacatcccatgcaactcatgcatgtaaagtgtacagtacagaggcttcagcacattcacagagctgagcagccatcgtcacaatccattttagaacattcttatcatcccaaagagcagccctgtatcccttatcttttaccttccgataggcccgctctctgctttcctggtccttggcaaccactgatctacgttctgtctctgtagatttgctaattctgcatatgctataggtgggtcttatgatggggaaattaagtccaaagagggtggctgagcagcccacagccataaaactaaggaaggggcagacttggaactggagcccagattccttgtttccaagttcatgctttcacaggaggtcttcttcttcccagtaacaattcctaaaatagtcagccttggttttgccccatggggatgagggctttacctccctcatctcacagtccccctcagatgtaggtacatttctgatacccataggtataataatgaggaaactgatacccagagaggctaatggtccaatgcaccatggctgccagcaaagagaagagggtaatagggaaaagcatttgtatgcccaaggactggtgagcaacacagaatacaaagagtcaagatgattcagcttaaaatgtaattttctttcaggttattctttcttacctatccacttccctttttctttcttttgtaggaaaaggaaaagaaagatccctctaccctttgaggtcacttcctgacccatttgtgcatctatgtagagtggttacaaactcacatctccctgcctgaatgcctcttattaatctggggatgggtggcaggtcagcatgcccatgggctctgacaccagacaggctgaggttcaaatccagcccccaccacccactgacttaacccactctagccctctgacagctaacctgtgacagggcctttctacctcatatgtctgaacccacagagtggtttctttctctctctctctctctttctttctttttttccttctttcttttttgttttttttgacggagtctcactctgttgcccaggctagagtgcagtggtacaatctcggctcactgcaagctccacctcctgggttcaggccattctcctgcctcagcctcctgagtaggtgggattataggcacccaccaccaggccaggctaatgtttttgtattttcagtagagacgggttttcaccatgttaagcaggatggtcttgatcttccaacctcgtgatccgcccgcctcagcctcccagggtgctgggattacaggcgtgagccaccgcgcccggctcagagtggtttctttccctacctattttattccatggaaaagaaagaatacacagaatggttccttccccacctattatccttgggaaaagaagtgtcattttacattagagtcctcccagaacagcgcctgccgccttgatgatgacgacgattgttaattctgagatggagtcttgatctatcatctatgctggagtgcagtggcaccatcttggctcactgcaacctctgcctcctgggttcaaacgattctcctacctcagactcgtgagtagctgacactacaggtgtgtgccaccatgcctgggtaatttttgtatttttagtagagagggggttttactatgttggccaggctagtcgtgaactcctgatctcaggtaagccgcctgccttggccttccaaagtgctgggattacaggcatgagccactgcacctggcagattatttttattttgaacaaccaagttagagtttgagaaagagatgaagagcccccagtactctctttcaatccactgattccttcagttgttcacctggggggtggggttgggctaggggttggttagcaaaaaatgagccaaagaagaaaatgaattaaaaacatgaaagaaaaaaaagcaaactgccatttatgatgaccattatctcacacacagtggacattttaactcaaaaatactataggctcacaggcatagattaaacagaaacctgttcttcatgttcttatttttttgcttgcttcccacagatgagagaaaaatccagccagaattggcatctgtcaagataggcttttaggagccacggctccctagagtggtctccacacattctgattatatgcaatctcattttgccatcaagagacttaacccactcccctatccatgtagactttgtaataataaattatacatatatatgactgaactaatatattatgtactttatataacacatactaaaacaaaagtgtgaaaaagattggttgaaataaatacaagctgaagttctaaaaaaaaaaaaaaaaaaaaagtgaggcaaaggaattgcccctagatgtagtcatttttcctggggaattggcccaatgacttcaagtggttgatgtcataatgagtccttccaagatctctttaaaaaattgatgtgttaagtgatctgtggtgatgagcacagctatacacgccagttgggagtgctgaaagaaatgaatccacagatcttgtgaagtcacaaacgagtcctatggcttgggatacaacattgacagtgagagtgatattcctcaattaaaaaacgctataacaggccgggtgcagtggctcatgcctgtaatcccagcactttgggaggccaaggtgggtggatcacttgaggtcaggagtttgagaccaatctggccaacatagtgaaaccgcgtctctagtaaaaatacaaaaaattagccaagcatgatggcatacacctataatcccagctactcaggaggctgaggcaggagaatcgcttaaacctgggaggtggaggttgcagtgagccgagatcgtgccactgcactccagcctgggcaagagagcaagactttgtctcaaaaaaaaaaaaaaacaaaaaaaaaacaaaaaaaaaaacaaaaaaaaccaaaaacacacacacacaaaaaaaacgctataacagaccagtggcacatgcctgtgatcccagtgctttgggaggtagaggcaggaggattgcttgaggtcaggagttcaagaacagcctgggacacatagtgagacctcatgtcgaaaaaagagaaaattagccaagtgtggtgtgcctctatagtcccagctcttcaggaggcagaagcaggaggatcgcttgagtcccggagttcgaggatgtggtgagctatgatggcaccactgcactccagcctgggtgacagagtgagaccctgcctcttagaaaacagaagctataactcaagcaacttggaagtgaaattcaagtgcctgacagctgtctaggtgcccctgaaactgcctctagtcacaacaaagatacctccatcaaagagcataggaagggtttgaatcagatagcttcatgcaacacacgaacggaaaaataaatttcttaaagaacatattagcttcttcccatgagatcaggaaaacgggacatcaattgtctggggttctttgctcctgactccctttggggctggcactatgttgatcacgttttacagatggggaaactgaggctgtcggtttttaagtggtctgcctaaggtagcagtaagggttggtctgactccagcgcagcctcaacgagggcttcaaattagggccatgaattggcaattcctggcgggtaattgtgaagagtatatttatttttaatttttatttatttatttttgagacggagtgtctctcggccacacccatcctagctcattgctgtctcgaactctcgagctcagacgatcctcccgtctaggcttcccaaagagctgggatgacaggcgtgagcccgggcgcccggccgggagtgtgttaagtatacggcaaacacctggactgcggccggctctccaggaatgccatgatattggggaattccctttgcacctggccaagtggcctcgggcaggtagcctcccctcgggttgcctcagtttcttctttggcacgcagaggcggggctccaggcctgggccgctccatggcggggagggcgcggggacgctgcactcggggtgcgctccgagaggcggacccggctgggcgcgcctggggcggggcgaggcggggcgaggctgggcggtgcggggggcggcccccgaggatcacgtggcgcggcgccgcggccgaagcagaagtagcgagcgccggcggcggagggcgtgagcggcgctgagtgacccgagtcgggacgcgggctgcgcgcgcgggaccccggagcccaaacccggggcaggcgggcagctgtgcccgggcggcacggccaggtgagctgcccggccgggagcgaggcaggcagggcgcccagggacctgcgccccgcggggaccggctcccagggcgctgcgtccgagggggtctgcgtcctggctcagccggagcgggcagggacggggcgcaccctcggggaccccggcccgccgtgcccggggtccgtttggtgacggcagggatcctggcccagccgctggccacttcctcaccccgggccggcgccacctctccggtccgtgcggtggggcggccccagctttgaatggggaccgggaggaaggtcaggggtcgtgtgggggctggcgttcaaaactcctcttttcgagcggctctgcgtggggtggcgccgtctctcctgaccgcccttgtgcccagagctcgcggacgctcggagccacacttccctgtctcacttcggtggttgcgggtggcgggtgggagcgataccgcgggaggcgcagtccttcccggagacttttggagagcttgcaggacactcgcgatgcccgctccgcaactgtctgcgtaattatgcgtgtgtctgtgcgtgttgtgttttgttgtgttttggaatcccaaagagggcattacccgcacagcgcaagagttcaggttaaagacgtgccccgtttggacggggagctcctggattccagcaggacggtggggcggggctctcttggtaccctaatcttgaactagggtgagaaactatggggggcggggtggtaaaggggtgacatggcgcgagggaaacaggtggccttgcccgtcggaacttaatttgaatttcagttccatcagtgggaccctgggcaagttgaagaacctttttgagtctgtttccccctctggatactggagccacccaattttccagggctgtgtcgagaattggggcttattgctgttccacgaggttcgctgagaatcggggcgcatccatggagagtccttgggcagttcctgactctctggttcaagggcattctctggggcatgggccctcgtccttggctacagttctgcggggaagttttacagaattttgaagtctatgccagcctcaagcagtttctcttgcaaaggtgtgtgtgcagtcacgtgtataccagctcagggacaatcgtcattgtgagcctcactgatgtttaagtcacctaatgatgcagctgccttcccccaccagcgactggagtatgggcagttcctctggaagtggaaaagcacagaccccatgaatagcccttttgcactcattgggtagagtcaatgaaaagctgctggtgagaaaacttttgaaaacatttcttggtcaggcacggtggctcacacctgtaatcccagcactttgggaggccgagctgggctgatcacttgaggtcaagcgttccagaccagcctcaccaacatggtgaaaccccatctctactaaaactacaaaaattacctgggcgtggtggtggccgcctgtaatcccagctacccaggaggctgaggcaggagaatcacttgaacccaggaggtggaggttgcagtgaacccagatcatgccactgcactccagcctgggtgacaagagagactccatctcaagacaaacaaacaaacaaacaaacacacacaaacacttcttaatttagaaaacagcaagaacacaaagagaaaaatttgcccgttacatcatcagttaatataaataaagtcaagttgtatcctctaccctctcccagcctccgataaatagtaaccactctcctggatttaccagaagatcacctttataaaaagggaattgtattatactcatacagttgcaactattgtctgaagctatttttttattgacctcacaaatctttccagatcaaattgcttatctatcatcctcattctttctgatggctactgagcgttcttcagtgcatgtgcaccattatttatccaggaggccccccacattgatgagcagttgttttctgtttttttttctttttttgtatttctattgcaactattgcttccgtgattttctgtcgtacatattgcatctttgtgcatgtctttctttacatgtacaattgcaggatcgaagcatatgcgtgttttgctttttagtagctgctcacaggttgccctaaaggagcaggggtggaatttacactctcacttgcagtggctgacaccattcctttgaaaatagtgtattccctctaatgctgcagggtgggtgtaaggtgcagcagtaatgtcccttgaactgttggaggggcccttaccactcaagtatttgcctgtgctccattttaacacaattgtcttgtgggatttttggatgaaatcctgtactggcttaccatgcacagagcactgaagagacaaaaacttccttgatttctggttttgggtcctcgcatctcatttcatgtcctttccccccaccccgcccccgagacggagtcttgctctgtcgcccaggctggagtgcagtggcgcgatctcggctcactgcaagctccgcctcccgggttcacgcctttctcctgcctcagcctcacgagtagctgggattacaggcatgtgccaccacacccggctaattgttttgtatttttttttagtagagacggggtttcatcgtgttagccaggatggtcttgatctcctgacctcatgatccgcccacctcggcctcccaaagtgctggaattacagtcataagccaccgtgcctggcccattttatgcctttctaaataagcttatgagatacaagaacatgaatgagcttatgagatacaagaaaaacctttagaaggacatgaaatgtaaaaatggcaaaaatcagttattcaaactcagccatatttgtatttacaaaataagtcattttatagaattacccattaagaatgggaaacaggaacaaaaaagggatttcaaggcttttttttttctttttttgaaaaaaccaaaaaaagcagaagcaaaatggaagttgctgtggtggctggtgctctctcctgggctcaaggtcttggagacctccctgccatagttgataaagcgtggaacgctggagacctgagctgggtgctggcaggatttgaatggtggactccagggatcttttggccgtgaagatctgtttccaattgcatctcataagctcattcatgttcttgtatctcacaagcttatttagaagggcatttcgtgagatacaagaaccccaaaccagaaatcaaggaagtttttctcttcagtgctctgtgcatgttaagccagtacaggatttcatccaaaatcccacaaaacgattctgttaaaatggggcacaggcaaatacttgagtggtaagggcccctccaacagttgaatggacattactgctgcaccttacacccaccctgcagcatcagaggggatacagtgttttcaaaggaacggtgtcagccactgcaggtgagagtgtaaattccacccctgctcctttagggcaacctgtgagcagctattacaaagcaattggtgagacgcagcatggaagtctggtgtttatggctgagttgatccactgggcttcgaagctggaagtaactgggaccctggggaaggttaagtccaaggccctcccagagtgagggctggaaagaactgaggagcctggtcccttgtcctggtttctgtctaattgaaggtgttataatggggcttgtgtttcctacttatgttccagtggacaatggcctagagacctgggagtggggaactccaggatgcatggctgggaacagtcaacatagtgaagagctctgtggttggcagctgggtcaaatccagtttcagctacttttttaaaattttattattatattattattatgctttaagttttagggtacatgtgcacaacgtgcaggtttgttacatatatatacacgtgccatgttggtgtgctgcacccattaactcgttttgctactttctatctgtgtgacctcggataagtcccttaacctcttttgagaggggcaagtactggcaaatcagttaatatctggccagatgctgccacaggattctggactaggggcttgggactcaggtgagggttttgatctttgtgctgctgctggtctacatgactttgatcaagtaatgtgacctcttgggatttcagttttccgctgccgtatttcccattgagataaatgagacgaaccagacacaacaggtgcttggcacctggggaagggcccaataaatggctgcttaacaaggatgaaatgggccatgggggcaccttgttcatccctttgtcctggctaatgatcaggaggtcattttgggtttctcctgataaggtaagatgcacattaactctcagcagggtttttttttagcatactctgttctgcctcctagcctttgcttaaacttaaagccagttcctcctgcttcatcttttttgaaagattgagttcagatgcctgcttttttcccctgaaagctttttctgagccctttaagtgcctagccacactccagattaaatttaggattccttcttgctgctctctgcccgccgtgcccccagtgcatgcttctgctgctgcacttgtaactacattagaattctcagttgattagtctgtttccccatgggcagagagcaggtgtaattatctcctgctgctggcatggctgaccgaggaggtccctttggtatgggtgtgcagtagagggaggtgggggcaaagggcaaatcctgggcccctccccattcccctcatttgcatcctagtccccacctcagtgcctggcatagagttgacatttgattaatgccttccccaatggctgattaatgctaactgagaccctggtaaatgctgcaggctgtgcatacattgtagctttttgtcttcccagctgccccttgtgggcatttaacctccattttacagatgagggaaccgagccacagatttagagcagcttggcagaaggctgagcccggctggaagcacagacagccctggctgaacaccagcctctcactcctccttctttggatcctgggagggtctctctagtgctactctgtaaccttgagagctacagagtaacaactccaggcacctccagggacttggagggaaaggaggagataagaaacagaacaaataatggtaattttaacaatagcttaatctaaggagtgctgactttgtatcattgttttaagggcctgagatacattatcttgtttaagccttacaaaaacatttagatggtggatactgttaccttcttttatgggactggaaatgagcccagaggatctaagtgacttcttgcagcctagctggcaagggggtccctggtggttcagctccagggcctggggagcgccttcactctaagtcctattttgggggcaggcaatgtgtttctggggatttgggaggcagaatgagggaatggtacagagtgagggctcagggagggactaagggattttgagcagaggagtgacatgatttgattcatgttctaaaaggatccttctggctctgcatctgagaattgaccctagcaggtcagggaagaagtggggagagcaggattagaatagttcaagtatgagatcctaggaggagccggtgaaagggtgagatgcgttggaagtggtcgtgagagagtccacgcaaggattcctccaaggttttgggcccaagcacctctctgacactgaccacccacaagcataaacagcaatcaaggacacctcctaggtgctggccgtcaccccaggtgctttgctggggcatttctgaacactcccattttaaaaaggctaaaactgaggcacagagaggtcaagcagtctacccagagctacacagtcagcaggaaccttctctagggtttgaacgtgaagctgccaagacctgacatttcctgcctttcatcctcatttctatgcagaggaaccatttgccaaagtctccatggatgattctgaaggtttagtttgtttttcgtttatttcattttttttttttttttgttcttaattttgctcaggaataaagagatggttagaaatctctagacaggatagagaaggatgttggagattaggggtgagaggtgggagccaggctgggctgctttggctattcaaatattctttaggataagagtgggtggggagagaggggactcactgccaggtcagggtgatttggttattcaaagcccacgtaacggttgggtccttgaggtcaggggctcttctcacacttcagtttccatttaaacctttgtgtcctgccttagctctctgagtggccagcgatgccttgccactagaaccttctcctaaaactcatcctgattgacatgagacaggattttggttcctgaagttcatgccctgttaactaaacccctttcagtactaaaatcagttcactctttaattctgccctttcagcttcctgatttctcccgattccttccttctccctggagcggccgacaatgtccaccacggtcaatgtagattcccttgcggaatatgagaagagccagatcaagagagccctggagctggggacggtgatgactgtgttcagcttccgcaagtccacccccgagcggagaaccgtccaggtgatcatggagacgcggcaggtggcctggagcaagaccgccgacaagatcgagggcttctgtgagtactcgctgggtggggcagtgtggcccatcctctggggccctggcctgagcacctgtccaccttcctgtcttgtcattactgtgattgttgttggtttgatgtgttcttttattcgtcttaaaatgaaagcattgccagtttgtgtggatctctgatgaggtttacaccaggtggaggaagttcagctgggaaaactctggtgaaagaactgaagctgaggtcagccaacatggaaatggcattcaggcagctctccttgcctggtggttctgtgccctgtctgacagcatcagggatcgtctggttcccacaactggtcgagtcatctttcctcttaagggcgaattagcccaagcctgcagaaactcatagcttggtcgccaaatgctaccttgttttactgcataccatagcagtgaggggcctttgctttagtctccaagcagggagagtgagttgttgaacgttttgtagctttcaaatgcaggtctggtcttggtagaggtgtccctcctcccctacctccgtttgattgggcagctggttcagatcctaaagtttctaagactgtttttaacaaatagagtaaaggcacttaagcaattttcagttgcaaatatttgctctaatttgtgtttttaaattaactagtttttaattgaaatatatattcctgggggttaaggagtcaactcaaatatttctcctccctaaaccatcctgctgaggcaagctcattaccagttacttttatcttccaaaatagtctatgcttgcataatgtgtgggtttaaaaagaaaacaattgggaactcttgtacacttctgcaccttgacttctttttgttaattaataatgatgttggcggtggtttcttatcagcacacattgatctcattctttcttggacacatgacatgtaatggcgcaggcctcaatgtaacagtttaactccagagaagggcatttcatgctatttccaggcttttgttattattcgaagtgactatcattgtactcttttttttttaaaacaaaattaatttttttgagacaaggtctctttcttttacccaggctggagtgcaatggcatgatcatggctcactgcagcctcagccccctgggctcaagtgatcttcctgcctcagtctcccaagtagctgggaccatgggaatgcaccgccatgcctggataatttaattttttttttttttttttgtagagatgggatctcactatgtccaggcttgtctccaattcctgtgctcaagtgatcctccctccttggcctcccaaagcattgggattacaggcatgagccacctcacccagccttgcactctttttttttttttttataatagattgattgagacataattcacatagtatacatagaattcacccattgtatgcagcatgtatagtgtggtggttttagtatatttatataaatgtgcaagcaccactccaatcaaaagtagaacctttatatcacctcaagatgaaaccccatacctttcaccatcaccccatcccctcatcccccctaccagacgtaagcaaccgttaaatttaattctgtttctataaacctctctattctggacatttcatagaaatggatcctatgtatgtgggcttttgtgactggcttctttgactcagcatttttcaaggttcatccactttgttgcgtggatcagaaattttcctttttgtggcagaatcatgatacgttgtatgggtattccacagtttattcagtcatctgttgacggacccttgggttgttgccaccttttggctaatataaatagtgctgctaagaatgtttctctacaagtttttgtgtggatgtctgtttttatttgttttgggtatatacctaggagtggaattgctgggtcatacactaactcagtttcatcattttaggaactgtcagactgttttctaaagtggctgcaccatttatattccttccagtggtagaaaagggtgatcgttgcattattcttcatttgtatatatgggtatatctgaaggacagcttcctgaaggtttatttctgagctgaaggatatggcatatatatattttaatagacagagtctcgctctgttgcccaggctggagtgcagtagtacaatgtcagctcactgcaagctccgcctcccggattcatgccattctcctgcctcagcctcccgagtagctgggactacaggcgcccgccaccacgcccggctaattttttgtatttttagtagagacggggtctcactgtgttaggcaggatgggggtatggcatattttaactttaaagggaagtttggcagcaccccacaaaagaggttgcccccactgtctgtttcagccacaggatgtaaaagtacctgttgcctgaaccctcatctatgctgcgtggctgctgaacttggccatccacaggtagactttggtagcttggtgtcatccttaatttgatgtatcctatcatgagtgtgatcaaactgctttctgaaaggcttttcctggttttggagcccagtgggtctcttgtggcacagagccagagccctgctttggaactgcccatgtggaggtggccatcttccctcttgactgtttgcattggccggctccacccccaggtggcccagaaacctgttgcagctggggtggccaccctcccttcccccacaaggggtgagagggttggcactgatggtaaatacagatgggccacgttgagactggactgcaggttgttcctttctcttctcaacctgcccatcccaaacctagctgcccatcagaaacacccaggggggatcttgtaagtatagggtattaaccatggcatgtgtatacacctgtgtaacaaacctgcatgctcttcacatgtatcccggaacttaaagtaaaataaaataaaataaatatatacaaaaaagaaattacagggtattagaaccttcttctgaagctcattgtgatgggcatgagacaggattttggcttgaaatctatgccctgtcattctccccttctgctgagtaataccatttcactcgcttacgcggatgcgctctctcgctctctgttttagagacagggtcttgctctgttgcccaggctagagagcaatggcctgatcatggttcactatagttgtgaactcctgggctcaagtgatcctcctgcccagtctcccaagtagctgagactacaggtgagtgccaccatgcctggctgattttttaacttttgtgtagatagggtcttgctatgttgccgaggctggtctccaactcctggcctcaagtgatcctcccaccttggtctccgaaagtgctgggattacagacaggaactaccatgcccggcctcaattcattcttttatttatctgttcagcctctttatttccttcttctttctccctggagagaccaagaatgatgatatttcaccactttggctggggcgtattattataataagtcccccggatggtctgataactaggcaggtttcacacatatgccactggagagacactgcccttcctccaccttccccctcctctccctcctcttctccctcccactttccctttctttctccttcccttcccacctttgccccccctccattgcctcccctctgtcatttggatgcccactgtaggcgccgccctaggcgctagagatacagcagttattaaattggattcaaatctccgtggagcctatattgctttattaggtatgagcagtctggggcttgacttccagtgcccttggatgagctttgctgtgtgatcttgggcaagttacctccactctctgaactttaattcccttatctgtggactggaaataacattggtgtctaccctacaggctcatggttgggaagaagcaaatgagaagatgcattggagaggctcggctgaattcatagtgtgtgacaggcactcagttgttgggaaccaccactttcaggatgtttgctgttgttgctaactagtggagtccagcctatgtagtcttccttaggggtttggactggaggggagtagggtccattctcaggttttcagaagagggatgacgtgattggatttgcatctttgagcatgcagtggaggtcctgtttgcaatgatggtgttggtaaagtgacagggaaagccaattatgtgtgaagagcttagaaatggtgcttctccctcacaccttgagagagcaggccttcaggccctgggtggggactgtcagtgtcaccgctcagtctcctgctgagaagggtgacgttttatctcaagaagaactcccagctctggcaatttcctcacggggttctggttagcaggaacttgctggttactgtggggtctgcaggggcaggtgcacatgagaggagcaccggcacctggttttggaatagttggcaaatggtgtgtgacttttggacaggtgttacaatccctgtgcagacctgggtaaaatacctaggtcctactgtctaaagcagcgtgtggttctcaaccagggtgatttttgcctccccctccctactccagggtagggggcatttggcaaagtctggagacgtgttgattttctcacctgggatacagggtgctactggcatctagtgtgtagaggccagagaggctgttaaatgttctatagtgcacaggacagtccgcaccacagagagtgatccagcaaacgtgtcagtggtgcaggggttgagaaactgctctagagtcatgtgtttgctttgctcacagcaataaaatgtcactgggtaaaatagggttttgctctgaaccctgtttggatggaactttctcatttgttcagcacatgtttgccatcatattgagtgctaaactctgcagagagagggaggaggaggatggagtcccagcttgcaagagggggagacagactcaaacttgcccttgcaagattgtgtgcttagtaccatagcaggagttttcactggatgtggtgtgaggagggaaggtttttgtccatttggatgtgggggaggtggtgaggaatggggagggctcattgtggaggagctgcttgggtggagtttagagagatttgctagatggttagcagggatggctgccctgatcctgtgggattaatgggtgtcatgtaatataaacaagcagatttgtgggtcatagatctgggcagagctcagctgggcaattcttctactctttgtagcctggactgaggtcatttggtgtcacctcgcctggaaggttccagaatcttcactcacacatctgataccttagtggtgatggctggaagactgagcttagctgggattattttttgtttgtttgtttttcagacggaatctctgtcacccaggctggagtgcaatggtgcagcctcggctcactgcaacctttgcctcctgggttcaagctattctcccacctcagccccctgagtagctgggattacaggtgggtaccatcacatgcagctaatttttgtatttttagtagagatgggctttcaccatgttggccaggctggtcttgagctcctgacctctcgtgatctgcccaccctggcctcccaaagtgctgggattacaggcatgaaccactgcacccagccttagctgggactgttgaccaaacatctaccatgtggtggtctcaggcagaagagtcccaggcagaagctacaggcttcttacgacagcctcataaatccgaggacatcacttgcaccaactcagatcagcaagcccagctcagcttcaaggaaaggaaatttctctcttagagaaggaatggcatgcatatcgatggtaggcaggaactgatggtggccaccagcagccaagctcccatatgagcatgtcgactctgaatcccaatttatgatgcaaatccctgctctgccactgtattagtccattcttatggtgctaataaagacatactccagcctgggcacagtggctcacacctgtaatcccaggactttgggaggccaaggcaaatggaccacctggggtcaggagttcgagaccagcctagccaacatggcgaagccccatctctactaaaaatattaaaattggctgggtgtagtggcacatgcctgtagtcccagctacttgggaggctgaggcacagaattgcttgaatgtgcaaggcggaggctgcagtgagccgagatcactccactgcactccagcctgggtgacagagcaaggctctgtctcaaaaaaaaaaaaaaaaaaaaaaaaaaaaaaagacaaaacaaaacaaaaacaagcaaacaaaacccaagactgagtaatttataaaggaaagaggtttaattgactcacacacaatatggctggggaggcctcaggaaacttacaatcatggtggaaggagaagccttcttcacatggtggcagcaaggagaaggagagctgagtgaagggggaagcctcttgtaaaactatcagccctcatgagaatttactcactatcacgagaacagcatggaggtaaccggccctatgattcaattacctcccactgggtccctcctatgacacatgaggattatgggaacgacaatttaagatgagatttgggtggggagagagccagaccatatcagccacttactagaagtgtgactggaagctaattcttttgttatatttctgtgcctcagtttccatatctgtcaagtgagataatagtagtttctatcttattgggtgagaattaaatggattttattttatgttctttttaagatgtgggaaatattgcataatcgaaacttaatacaataagaccagaaagaaaaaaggccccctggtgaggacccccaaggcctggcctctggcagagaagactgagtctgaagcacaacacctcacttcctggcctccaggttccctattgctttccaggggtgttggataagatggtgctgggattccttccatccccagccttctgcatagagttaaggagctggttgtctctgaatgtcgggagggagcttgtggtactgttgggcatgttggttttctttcctttctgagggacctagttgagcagtcttcaggtgggaaggggtctgctctggggcctttctgagttgagccttaggtgtcctcttgcatcttgtccatttgaaaggcttggattttgtctcaggagccgatgtggtgccacctgtttgtgggtctggaattttagggtcggctgtggtgatgggcccttttgagggcctggatgcgtccatctcaactgtgtaggctttttatcctgacattttcacttttgcttaggcatatcttctctgtctgcttatttgtggcaagtggtggctgcccatgagtgacggattctcaaacatatgagctgtctgtttccttggtattaggttcttggggttcccacttaataatgataatagtgataccgttgatgagagcctcttctaatgaatgctcactgtgtcctagtctctgtgaaggcacatcaaagataactccttaatccccgcagtggtccagtgaagggggagctatccctgctttattcataaagagattgagtcttggggagatgagatgacatgcccaagttaaggaaagggcagagctacaatttgaacttgttcttcccagtctcagtctcaagtcttcttcctgctctgtgttgttttcttctcctaaatgatctcaaagacgtatcagatctgtgtgtcataaacaccctgcctgagaccaaagaatggcagcttcatttagagtttctttgtgacagcaggacagaaacacatgaattccttacgtgtgcagaggacttgctctgccaggtgctggaggtaccaagagaaaggagactcagtgctcatcctagaggcgccggatttgtggggagatgctaggaaaagaccacaaacacagcctggaaaagggctgttggggacaagggtgccgaagtgagagtttactgtattttggctcatcctgaaatccactcttggacttcttttcatggaaaaaatgaatatttttgaaagttattattttatcaaaatgtttttgaaataaatgtgaaattactattaataataataataaatgaattattttctcgctggcatctcctaagaagaaatccattgtctgagggtggtccccaagcccctgcaatgaagcgtctcatcagaaataagacgcaaccaatgcctgaagtgtccataaatgtatttgcctttcagttactggtatgcggtgatggtataaagaagggctgtcaaatcctggtcctgcacttggtaggggtgtgaccttgggtctctcatgtcacctctttgggcctccatttccttatctataaaatgagaatagttgaagaacacaccccataagactcttgtgataagtaaatgacgtgatatatgtaaaatccttcaatagtatctggcacagaggatgtgcttaagtattttttgctcttgctgtcgttgatgtcatcattatcatcatccagcataaaggcaagatggcattgtagaaaggatgggataaatactacattttccatttatatgaggattttccttcctgcacccgatggattgtcctgctccccctggagtatgtgtcctccactttggagcatgccagtgtgaaaagtagagttgacatttttattcttgatggtgctatagcccttctcttatgctgaatagctgaggaattgcttgtcttgttttcaagagttgtcttctatcctggatgacaaccttagaatgttcttagaatttgttcctttgttgatttagcaaatactcaaagaggacctgatgtgtgttgggcaatgtgcttgtcactggggataaagtagtgaacaggaccctgaagatctctagaggatcttacaatcttgtaggaaaagcagaaaaagtcagactaacacattcaatcatgttggatcgtgatagacgctaggaaggaaaggaacagggtactgtaataaggagtcattagtcaggagcactagcctagctggggaaggcctcagggtggcctctctgtagaggtgatgtttgagctgagacttgaagggtgagaaggagggagccatgggaagctctgtggggagagcattctggcatagggcatagcaacaaggctttcctattagtgaaggtagcctaattgcagtaacaagttatttcttcctgtaagtttatctctcactcactcaaatcatgatccagtgggattgggggtgggactctgctgtctgatcacaatgggactctgtgctatcatctccaaaggtgttggaggctaccgcaggatcctttgtgtgaccactgcatggaggaagaggaagagcagaggatggctcaggaggttggaggtttctatgggccatacctgaagtggatgtacctgtttcctcccacctgctttttttttttctccccaagagatggggtcttgcttattgcccaggctggagtacagtggtgtgatcacagctcactgcagccttgaactcctcggatcaagtgatcctcctgctttggcctcccaaagagctgggatcacaggcatgggccactgtgcccggccccctcccaccttctattgaacagaatttggcatgtgaccaagtgcaagggatgctgggaaacatgccctagccgcatgctagaagaacaggacctaagttggggggcatccttccaggcttttctgtaacccctaattttggagggtacagaggcagctctaggtgccccagtgaaggctgataagcaggttgatggtaagggtttgggagtcttgtaggaatccaggagaatgaacagtctcatcgctgggctgcatggaaagggaagtggtgagccactggcactgaggactttcctgtctgtaactagagctgctgatggtgatgtctcttagacagcctcatctgccctcttgggtttctctcacagatgtggccctcccctccccagcacagactgtctccaaaccttggctttttctgttgctgccacatcagtgacagctttggttttgcaacctcccaaggatggacccctgagagagaggcctcctatgggccatgccttttaaagccagcacacatgagcaggctgctttggagatcagtatcctttggcacggccagcctttcctgggcataggggtggattggaggtggtctcctgtaagaggacatcgtctggctcccgggctgtgggcagtggtgggtgcctgttacggattgaattgtccttaccaatttcatatgtcaaggtcctaatccccatactcagaatgtgatcttatttggaaagagggtctttgcagatgtaattagttgagatgaaatcataatggaatagagtgggccctaatccaatatgactggtttccttatgagaagaggagagagagacacagggagagaaggccatgtgaagacagatacagaaatctgagtcatgcatctgcaagctaaggaacaccaggggtgctccctcaggaggaaccagcctcgccaacactttgattttggacttctggtctccagaactgtgagacaaacttctgttgtttcggccatccaatttttggtatttcatgagtggcaggcctaacacacaaatacactctcatgtaacaggggcctgagggcaacggggtgagtacagggattgacctacccattcagccactgatactatggatgggttgtggtttgtcataacggaatttaagaggcgttgctttcttccacgtgtcatgttattttctagctgcgttggttctggcctgggccctgagggtgtaagagggaatacagtgtagtgggtaaacgagggaggcagcatttgtccctcaaaatagcaccaagttctgggaatgcaggtatatttggagttcctgacaagtcagtgcaggtccaacgtcttagggattgtgctgagttgggggagggatctagttaaagatgtcccttggtgaatcatttttgaaaaaaaaaaaattatctccactacctgtcccctagtctgtcttagatataaatgcgggtttttgtatatcaggctcgcaaaattatgtgtcttgatttgtcttgggagagatttaggtgctgtgcagtttggggttgaaatcagaaatcctggggttgacttttcctgctttcatgcaaggcccgatcttggggccaggccttcggtagtcctgacccacagactaagagtgctgggaggccagggaccctgtctgttctgttcataagggggacttcccagcacctggcccatatctggcctgtggctggtgctcctcagatacctggttaacagatgaatcaggaaaaggccctggctgcccctttcagcctcggacttccggtttcttcctaaccatggcagcagtatctggggttgagatagggcacctctgtgacaacttcctctttaaccatacaccgtggttccactcgtggtcctggcacttagtgactgtgtgaccttaggcaatctacttggcctctttgagtctcagttttcttttttcttgtcttttttttttttgagatggagtctcactctgtccccaggctgaagtgcagcggcacaatttcagttcactgcaacctctgcctcccgggttcaagcaattattctgcctcagcctcctgagtagctgggattacaggtaccctccacctcacctggctaatttttgtatttttagtagagatggggttccaccatgttgaccaggctggccttgaacttctgacctcaagtgatctgcctgcattggcctcccaaagtgttgggattacaggtgtgagtcaccgcgcctggcctgagtctcagttttcttatctataagatggggtaatagtggagcttaccccatcagatcactgggaggattcagtttgtaagtgattgtcacaagtccagtatgtacttaacacagggtgcctcccagccatgctgccatatgtctcctcaggcagcaggtgcctgcatttgtgtttgcgtgggggacatgggacaggctgagacatagctcgcatgtgtagggggtgtcctcctcctgctcttctgtagcacacagctaggggtcctctggggttaagtgctcttggacctgagcctggatataaaagcagcccagtgcttctgggaggctggggaggcctgggcttggagaaggagcgtcgacagggtgaaggtgaagttctggaaatagaaacagtgatgataccacatcacagcctgggggccactccactgtcacagggctgttgggaagaagctgtaaggtgctgctttcatctatacaagttgtgctggtggccaggggtaggcgtgagttttgggaggtgaagtatctgtgtgtgtgaaggattctgttttgagaaagaaggaaatgggaacttactaatttgtagaatggaaactagcaaaattaggcaaggcatggtgagagcatgtgcagcaggaagaggagaccccgcagagctcagaagaggtggaggaggggctggcctccccggcctcaggacttcagggatcccactgcgtcttctctgctcctgcttcggctggatttcaccggccaggtgtctctctccccagcactaccagccactccaggatgtccctggcctgccaccagcctccaccagtgggaaaagcccctacaccaggtagtagcatgactgaaggagggcccgtgtccctggggaggcaagaagggcccaagcccagcgtggcgcagagtgaacgttacgccagtttcctgtttagacagctctgagctgcttccctctggccttgcatatttctcctaattaaaacaactgctttttccccctcattatagaagtactatgtgttcattggtagacacattttaacctacttctgggtgagaaaaacaaccccttagcccccgccacccccctacccagagagatggtgttaacacctggtgtaccaccttccaaatctttttgtccaacaaaactttattcacaagacattttcacaacatgcgacccttttgtaatgtactttagtaatctgcctttttcattttgtactactttgtgaccatgttagtattattaactaatttattttagttaatgaattaattaattttttgaggcagggtcttgctctgtcacccaggttggtgtgcagtggtgtgaccataggtcactgtagccttgaactcctggcctcaagagatcctcccatcttggcctcccaaagtgctgggattacaggtgcaagccactgagcctggcctgttattaatttttttttttttttttgagacagagtctcgctctattgcccaggtgcaatggcaccatcttggctcactgcaagctccgcctcccaggttcacaccattctcctgcctcaacctcccgagtagctgggactacaggcgcccgccaccacacttggctaatttttttgtatttttagtggagatggggtttcaccgtgttagccaggatggtctcgatctcctgacctcgtgatcctcccaccttggcctcctaaagtgctgggattacaggtgtgaaccactgagcccagcctgttattaactattttaaatgtcgatgttggtttaaaaaataatatgacagaccccacatactcaagagcaagggatccagggtctgactgcctgggttcagatcttggctatgccacttatcccatttgtggccatggacaagttacttaacttttcattgcactcatctgtaaaataggataataatggtacctattacactggactctcatgaggattaggggagttaattatgtatcatactttgggtatcatagtacctggcaaatatcccaagcactctataagagctactattgctattattattgtttaaatttacttttattgtaagttctgggatacatgtgcagaatgtgtgggatacataggtaagcgtttgccatcgtggcttgctgcacctatcagctcatcacctagatattaagccctgcatgtattagctatttattctgatgctctcctccatccttaccctgctccccaacaggccctggtgtgtgttgttctcctccctgtgtccatgtgttctcattgatcagctcccacttatgattgagaacatgcagtgtttggttttctgttcccgtgttagtttgctgaggatgatggcttccagcttcatctatgtccctgcgaaggacacgatctcgttccgttttatggctgcatagtattccatggtgtatatgtaccatattttctttatccagtctattgttgatgggcatttgggttgattccctatcttcgctattgtgatactattgctattattattattattattattattgttatttccaaccctctgtgataggcagaataaacgctctctgctcccaagatgcccttgtcttaatccctggagcctgtgaatatattactctatacggcaaaatgctccttgcagattgaacagatcttgagatggggagatgatcctggattatctgggtggatatgatgaaatcacaaaggtccttgcaggagggaggcaggagggtcagagtcagagtgagactggaagatggcaccagctggctctgaagatggaggaaggggccatgaatcaaggaatgcaggtggcttgtgcaagctggaaaaggcaaaggaactcattctcccctagagggtctggagaaagcttgtcccagtgatgccttgattttagccccatgagactcatgacttttgctcgtctccagagctgcaagataatcaatttgagtaaagctattatgcatgtgggaattcagtagcgtagcgattgagaataaataacccccaaccccgcaaccaacttagatgagttgtgatgtttgctttggatcttttttgtttttaagaaataaaatatagttaagttctcataagtacccttccctccctagagaaatcagtatcatgatttaataattataattcccatttcaaaaattttcatccatgattaacatataatatgttttgcaggtctttacataaaagacactgcgtggtgtgtatccctcaagcaacttgcatgtttttgcttgaccttgtgaagattttccatgttgatgtagctttattttaacatccatgagcaatttcactcaacagtacaccacgatagattgatctgtcctgtcaatgctggacatttaggttgtttccaatcatgatactcccgattccagcaaacacgtcttcgctattgtttgaaattactataggattctaccttattttttaaaaacctatctcccattttttcgatattagatagttgttttttattttctttaattttttttttcttgaggtggtgtcttgctttgtcacccaggctggagtgcagtggcacaatctcagctcactgcaacctccgcctccagggttcaagcgattctcttgcttcagcttccccagtagctgggattacagttgtacaccaccacgcctggttaatttttgtacttttagtagagacggggtttcactatgttggtcaggctggtctcgaactcctgaccacaagtgatccacccacctcagcctcccaaagtgttgggattacaggcatcagccatcacacctggccaacatttcattttgaaatggcttccaaaaaatctgtggctgtgcagaggtgcccaccaacattctgtctggaatgaaaaaactagaagttagctccttcaggtgagtacagtcttttttttttttttttttttttttttttttttttttttgagacggatctcgctctttcgcccaggccagagtgcagtggcgctatctcggctcactgcaagctccgcctcccgggttcacaccattctcttgcctcagcctccacagtagttgggattacaggcgcccgccaccgcgcccagctaattttttgtatttttagtagagatggggtttcaccgtgttagccaggatggtctcgatctcctgacctcgtgatccacccgcctcggcctcccaaagtgctgggattacaggcgtgagccaccgcgcccggcctcaggtgggtacagtcttattcatgtctgtacttccagcttttgctaccaagtgttcccagtagatgcttagtagatatgtgatattgaatgtgtaactgctaccttgacctaccaccttctcttgatgaggaacctatagatttgttttctttctttttttgtttttgttttgagactgagtggagtttcactcttgtcgccgggctggagtgcagtggcgcaatctcagctcactacaacctctgcctcccaggttcaagcaattctcatgcctcagcctcccaagtagctgggattacaggcatgcgccaccacgcccagctgattttgtatttttagtagggacggcatttcatcattttgatcaggctggtctcgaactcctgacctcaggtgatccacccacctcagcctcccaaagtgcaaaagaaattaatacttttattgagataaaaacattgtataccctataatgtaccccttaatgtatactgttaagtggtttttagtatattcagagttgtaccaacattatcataatcagttttagaatgtttcataatttcccccaaatcctatacattagcagtcacctctactttactttcccccatccctggcaatgacaaatctactttttgcctttacagagtttcctattctggacatttctcacaatacatggctttttgcatttcactttttttttttttttttttttgtgagacggaatctcactctgtcgcccaggctggagtgcagtggcatgatctcggctcactgcaagctctgcctcatgggttcatgccattctcctgcctcagcctcctgagtagctgggactacaggtgcccaccaccacgcctgtctaattttttttgtatttttagtagagatggggttttgctgtgttagccaggatgcatctcacttctttagcctaacataaggttcgttcatattgtagcatattatcaacacttcattcctttttaagactaatattccattgcatggatagaccatattttgtttatccattcatcacttgatggacatttaggtagttctctctttttggttactgttttcattttctttgttctttctttcctttctttcttttctttctttcctttctttccttcctttcctttcctttcctttcctttcttttctccttttcttttcttttcttttcctttcttttcttcttccctccctccctccctccctccctccctcccttccttccttccttccttttctttctttctttactctctacagtctcactgtgtcggtcaggccggagggcagtggtgcgattttggttcactgcatcctctacctcctggattcaagtgattctcgtgcctcagcctcctgagtggctgggattacaggcgtgtaccaccacacctggctaagttttgtatttttaatacagacagggtttcactatgttggccaagctagtcttgaactcctggcctcaagtgatccacctgccttgcctcccagagtgctgggattacaggtatgagccaccgtgcctggactctttttggttattgtgaataatactgcggtggacattcatgtacaagtttttgtgtgaacacatgtttccatttctcttggctctttgcctaagagtggaattctaggttatctgtaactgtttaatcacttaaggaattgccaagactgtttgccaaagcagttgcaccatttactttcccaccagcaatgtatgagggctccaacttccccatgtcctcgccaacacatgttagtatctgtctttttggttatcaccatcctagtggaggtgaagtgttatgtcattgtggttctgatttgcattttcctgattgctcattgctctatcttaaatagttgatgtaataatttccttctaaacattggctttctgtagacagtgtcctattttcaacttttctgggccccagcattgtcttctggcatggggttggtgctgactagggcgtaaatgaatgaggcaactctggatatgttagcttgcagcacatgggcatggacactgattggcaaggatgtgcttcttggcttgagtcaagaatcatacattttaaccatcacttctgctttttttgtggcacaaaaggaccattttttgaagttagtaacctgtcttagttccctcagtagatgtttgtccaaatgttgcggtgaagcatagcacagacttttcatcatttcaaggtttaacgcctcagcccagggagtgtatatttggtgaccgttttcccagagccctggaaatgcttcttcctaactgtccactttgagctcctctgcctcctctttggcaatcagttacctcctaagaggaacctggagaaatgtcattgggaagtgctgctggcaccaggatgagagagtgttcttgaaagcttgggagcagtattgagcatctgccatgtgtcagtattgtgctgggcactacaagctcacatgtatccatgtgatcatgtgtatgggtatttatttgtagtgtctagtcattacaatctgtctgtgagttttgcctggtttactcctaagtacagtgagcttcagtgatttgcccaaggttaccaaagttttcagaggaacaacatcagacacttttccccaatcaccatgtgccagaaaacctttaggttaagaggttaacaagacaagccacagataggggaaaatatttatgaaacaagagctgataaaggacccatatccaaaataggcaactcttaaaactcaacaataaaaggccaggctcggtagctcatgcctgtaatcccagcactttgggaggccaaggtggatggatcacaaggtcaggagatcgagaccatcctgactaacacggtgaaactctgtctctactaaaaatataaaaaattagccgggtgtggtgtcgggtgcctatagtcccagctactcaggaggctgaggcaggagaatggcgttaacccaggaggtggagcttgcagtgagcagagattgcaccactgcacttcagcctgggtaacagagcgagactccatctcagaaaaaaaaaaaaaaaaaacaaaacgcaagaaaacaacaaaaaaaaccaaaaacaaaagctcaacaataagaaaacaacccaattaaaaagtgggcgaaagatctgaacagatgcctcacacccccttcccccaccccactcacaatgctttgccatccatgtctccatcctgcagtagccaaagctggctgcttctggaccactgctgtgcaatggaaatacagtgtgagtcaccaataccagccatgagagtagtgttttgttttgttttttttttttttttttttttttttttttgctgttattgttgttttgttttttaaatagagatgggattttgttctgggtgaagtgaatcaaactcctgggctcaagtgatcctccgagctcagcctcctgagtagctgggattacaggtgtgagccactgtacgcagtcatgtgtgtagtttaaagttttctagttgccacattcataaaggtaaaaagaggtgaaactaactttattaataaattttatttaactcagtatatccaaagcattattatttcaacatgtatgcaatataattattaacgagatatttgattctggtttttggtctgtgtcttcaaaatccagtgtgtgttttatacctataacacatcttgattcagacagattcaattctgagtgttcaaaagccacatgtggctagtggctaccatattggatagcacagatctagattatacctcttttgtccttttgcattacctgcttccgtggtccccaagcagcaaaggcattctccatgtggcaggtactatgatcatcatagtggtgctccctgtgtgtgtgatcaggtagctttaatttcccacagagactgaaaatgtggaagtgtgtctaccagctttgccatctgtcctagatttaggtgtgacatctgattgctgggcccgagcatccagtgccagctgtacttctgcagattactgggtaatcacagtagaacctttcttgggggttgcttttgacccaggcagcactgctcagcttgtggccagggagcttcatgaccattgagagtaggagtctgcaccattacatgatcataggatagcctgcagacatgtgattcgtgtcttgtaagttgtaactgagtaaatttttatatatggaaagaaatagaatgctgaaagggggatcatgagggtccaggtgtggggctggggacatggaaggcctcactgagaagctggcatttgagcaaaggcttggaaaagttgaaggagtgggctgtgtagataagtgttttgagggcttcaggaatggccaggacaaagccttcgaggtggggcatgttctggggatagccagccaagcagggtgatgggggcagagttatggggaggaagcaggggtcacatgacccagggctgtggaggcctccatagcactcaagcttttcctccagggagccgggagccatgggagagtttgcagtggatgacggatgactgatatggcccctcgggctgctctggttggctttctcctgagtcgtccattctaccttctcgccaaggcttcctaggtcatgtttcaagtctgttcaatgcatttccttctccaggtggtcagtggagacctcacagcagaggcttatcttgttgaacgtggtgattcatgtggtgatttcacagggtcagctccccatgtcttgtcccagcggtgtcctcctcctacatcaggagagggaggtcagctctgggacccaagaaagggcagggtgccttggtaacccttctgcaggcttgagggattggggcagtgtgcatctctgcgaggagggcactgaggaggatgggcttctcagatcctgggctctgccttctggatctgagatccaagttgcaaaggaagagctggtttcaggctgaagcattttttcagcttcatacaaggcaggaagcccatcaagcccccacatcgtcatcattgtcatcactgtcactaacgccaccataagagctgacatttatgtagtatatgtttatgtacctgttacagctctaagagctttccctgtattattgcttacttaattccacaactgtatgtgttcaatacgcattatttccattttacagatgagaacattgaggcatagcccagggtcactgtattagtctgttctcacggctataaagagctaccaaagactgggtaatataaaaaggaaagaggtttaattgactcacagttcagcatggctggaggggccccaggaagcttacaatcatggtggaaggtgaaggcggggctggcatgtgacatggagaaagcaggagcaagagagagggggagggaggtgccacatacttttcaacagccagatctctcaagaactcactgaatattgcaaggacagcaccaagagatggtgcaaaaccgttaatgagcaattcatccccatgatccagtcaccttccaccagaccccacctccagtactgagggttacaattcaacatgagactgctgcggagacagatatgcaaacaatattaggttgtttctaccttttggctattatgaatagtgctgctgtgaacattcatatgcaggattttgtgtagatgtgttttcctttctcttgggtgtacacccaggagtggaattgctgggccatgcggtaaccattcatttaagcatttgtgactacatttaaccttttgaggcaccaccagcctgttttccaacggggctacactgttttgcatttgccaaggcctgttggctgttttggaggcaaacccctccccttaagttccaaagaagtgaatccccagtgtcctgaggtcagaatgtccagggcacccttttagagagagagggaggagggtcctgagagactgtactggagaggctgtgtggccccaagcccacagcactgagtttgagtctcagctctgccacctaccactgtgcaatctttttattttattttattttattttatttttgagatggagtctccctctgtcgcccaggctggagtgcggtggcatgatctcggctcgctacaacctccgcctcccagattcaagccattctcctgtctcagcctcctgagtagctgggactacaggtgcccgccaccacgcctggctaattttttctatttttagtagagatggggtttcactgtgttagccaggatggtctcgatctcctgaccttgtgatccacctgcctctgcctcccaaagtgctgggattacaggcgtgagccacctcacctggccaccactgtgcaatcttgagcaagctccatagcctctgtgggcctggcctctgtttccccctatgcaaaatggggcttatcagagcatgctggaggggctcccatgagatcaggggagacatgagcttggtgtagtttgtggcctattggacctgcctgatgaaggttgctgcctgtgaggttggtggtgtctaccaggcattgtcctctaaaatataatactcctattctaggggtgaggaaggagtgtgggtgtgtgttctgagtagctcatgagagagtgggaacctgtgctaagccaggcctggtctctctgagcatggtgacttggacttgttgcttttgtggcagggaactgaaactgttgcagacactcttggcctgaccttatcccctcagcacacacctctgcacaccacaagccacttgctggaaacacctgtgactatgcctgagggcttctgctagcctgtggtacaggataggctgggagtgctggggtgttagtgcctccaggggtggcatggctgggtggggaatcggcagatcaataccccagctccctcaccctcagtcaggacactcctggcttgttctgcactgactcccaggcttccccaatggacttcggctctatttactcacaggaataataagcttgatgacacagcctttatttgctgcgcttccttccctgtccaccaccccattccccttgcagtgattcctgggatagcccccaaataaactccttgtatgtacatccttgcctcagagtctgtttctgggggaacccagatgaagacagagacccacttagaccctgtgtcaggaaacacatggaccagacttgggccaccctgggacttgctgttttctctgttccctgcggtgtgtgagcctgtgtgtgcctatgcatgtgtctttctcctcttgcccctgattggctagccttgtcacttctgtcctgattctagagggagtgtctgatgtcccagttattgctgccctcagcagagtcaggattttttggccggggcggggggtggggtcagaaaccagctcaagcaaaaaaagagaatttactggaacgtgtggctgagatgcatactgtgtagctcacagcatccaagatgcaatgcctttcccatgctctcttcatctttctgccagtctttgtctgccaccatggttctctccttttttttttcttttttttgagatggagcctacctgtgtcaccaggctggagttcagtggcgtgatctcagctcactgcaacctcctcctcctgggttcaagtgattctcctgcctcagcctcctgagtaggtgggactacaggcactcaccaccacgcccagctaattttgtatttttagtagagatggggtttcaccatcttggccaggatggtttctatctcttgattctcgtggcatgcctcagccttccgaagtgctgggattacggtgtgagccaccgtgcccagcccatgcttctctcctatcccagacgactctagtctatagaacacgtaacgtggccatgagcagcctcataagagaccgtttttctctcagcatctatgcttggccttcgttatttgcagcatcagtattggtgaatttgcctttctgctccaacttatttgcaacctgcaaagcagtagttctggcccttctgtggtcattcttggtgatgcagactggtgaaaaatttgggtcacccattcacacatgccctgctgaggtcaaacaagatgacactctgccttcctgttttagctttctttttgcaaacaggtgtcctttctgccgtccacttagtgccttattttctgcaatttctttttttttttttttgctggtgatgttgctctttaaaatggccctgagcaaagtgcatttatttctcattaattcattcttcctgttattgatttattcagtgactatctatggatcatttgctcagggcaaagcactgtattgagttctgatagaaggagacagggtctttaatttcatcgaccttattgtttagtgggagaggcaagcacaacattgatcaaataattttgtacatgactatatttataacgaaaatgaaggtaacttttgcttccctctctaagaggcaccaagggaggttatgcacctgagaagcagcccagggaacagcagcgaaactgatctaacagtggccttcctggccctagtggctgtgctttgtggtctaaggccacgtttaacctgtgtaccagagggacatgagtgtgcacttcctggaatgaccctgaggtgttcagtgtgctggggaaggtcatatggcaccacgtatgacagcagtgttggggttgaacaagcctgggcttgcctcctgagtctcccattctgtctgtgtgactccctccttgggtctcagtgtctgcatctgtcaaatgggcacaccggtggtaccttcctcgtgtgtgggtgtaaagactagagatcgggtatgtaaaacctttaggttagtgctcagttatgagcactttggttggcagtatcatcgataagggatggttttgcacgtcggggttcaggactcaaaagggaaggccattcccagtgttagtcacctgagaagatgatggattccctaggctgggaactggtttcaggatgatgtttccgttttcttttttctttttttaggtatttctcctagtgctatccctcctctagtcccccaacccctaacaggccccagtgtgtggtgttcccctccctgtgtgcatgggttctcattgttcaactcgcacttaagagtaagaaaatgtggtgtttggtttcctgttcttgtgttagtttgctgagaatgatggtttccagcttcatccatgtccctgcaaaggacatgagctcatccttttttatggttgcatagtattccatggtgtatatgtgccacattttctttatccagtctatcatcgatgggcatttggattggttccatgtctttgctcttgtgaatagtgccgcaataaacatatgtgtgcatgtgtctttatagtagaatgatttacaatccttttggtttatacccagtaataggattgctggatcaaatggtatttctggtgctagatactcgaggaattgccacgctgtcttccacaatggttgaactgatttacactcctaccaacagtgtaaaagcattcctatttctctacatcctctccagcatctgttgtttcctgacttttttttttttttttttttttttgagacggagtcttgctcttttgcccaggctggagtgcagtggtgctatctcagctcactgcaagctctgcctcctgggttcacgccattctcctgtctcagcctcctgagtagctgggactacaggcacctgccaccgcgcctggctaattttttgtatttttagtagagacgaagtttcaccgtgttagccaggatggtcttgatctcctgacctcgtgatccacccgcctcagcctcccacagtgctgagattacaggcgtgagccaccgcacccggcctgttgtttactgactttttaatgatcgtcattctaactggcatgagatggtatctcattgtagttttgatttgcatttctgtaatgaccagtgatgatgagcttttttcctatgtttcttggctgcataaatgtcttcttttgagaagtgtctgttcatatcctttgtccactttttgatggggttgttttttcttgtaaatttgtttaagttctttgtagattctggatattagccatttgtcagatggatagattgcaaaatttttcttccattctgtatgttgcctgctcactctgatgatagtttcttttgctgtgcagaagctctttagctgaattagatcccatttgttaattttgccattggttttggtgttttagtcatgaagtctttgcccatgcctatgtcctgaatggtattgcctaggtttttttctagggttttttatggttttaggtcttatgtttaagtcttttatccatcttgagttaatttttgtataaggtgtaaggaaggggtccagtttcagttttctgcatatggctagctggttttcccaacaccatttattaagtagggaatcctttccccgttgcttgtttttgtcaagtttgtcaaagatcagatggtggtagatgtgcgatgttatttctaaggtctgtgttctgttgcaatggtctatatatctattttggtaccagtaccatgctgttttgtttaccatagccttgtagtatagtttgaagtcaggtagcatgatgcctgcagcttgttctttctgcttagggttgtcttggttgtgtgggctcttttttggttccatatgaaatttaaagtagtttctaattctgtgaagaaagtcaatgatagcttgatgggaatagcattgaatctataaattactttgggcagtatggccattttcaccatattgatgcttcctgtccatgagcatggaatcttttttcatttatttgtgtcctctcttatttccttgagcagttgtttgtagttctctttgaagaggtccttcacatcccttgtaagttgtattcctaggtattttattctcttagtagcaattgtgaatgggagttcactcatgatttagctctgtgtttgtctgtcatggtgtagaaatggttgtgatttttgcacattgattttgtatcccgagactctgctgaaattgcttatcagctgaaggagatttttctataacagtgtgaaaacacaggagcttaaaacaacaattctgtgggtcaggaatttgggcagagctcagtcagtggatttgctgttctgtctcacttggtgttgcctggagtcccttacctgaatatattcatcggatggccaggctggaagttcccaggcagctttctgggccgccagtgttcctttgtgcagcgtctctccctgttctgtggctagtttgggcttccttacagcatggtggtctcatagtagctagtcttctctgtgatggcttccaaggcacagaaagcagaagcctgaagcttttgctgtgttaaaaggaagtcacaaggccagccctgacacagggaagggaaatagattctacctgttgatgggaagaagtttgtggctatcgtgaatccaccagagatggagaccctggtattcaggggcatctctctgagccttgaccttgggtgtgttgagtgatctagaaggcaggtctggtacttggatattagaaggctgccctccataaggagagaggataaggggctgggaacccaggctggggtctgtgtgttagtgccaaactttggggctaggatataaatgtcttaagatacagcggaggggaatggtaccgggtctgaaggataggctgtctttttgcttgttttctggttatttcactgttctcctcaataggtaataaggtcttctcaggggacctgcctgttttagcagtgcttcaggagctgagacaggggcagagatatagtctggggtcagaatgtttaggagtggaggatctgcgaggtggggtgtagccgggattggattgaaaggtacccatggggactgagtgcagtggctcatgcctgtaatcccagcacttgtggagattgaggcgggcagatcacatgaggtcaggagttcgagaccagcctggccaaaatggtgaaatcccatctctactaaaacaatacgaaaattagccaggcatggtggcatgtgcctgtaatcctagctactcgggaggctgaggcaggagaatcacttgaacccgggaggtggaggttgcagtgaaccaagatcatgccactgcactccagcctgggcaacagtacgagactctgtctcaaaagaaaaaaaaaagacaccctgggggacatgaagcacaggcagaatggagagcaaggacccaaggcttttgtcctgtctcactgttcccttgctgtgtgaccacagggagttaacctctctgaacctcagtttctttgtctctgcagtggggattatgatgatcctctccccatagagttgggataaagattaaatgagccaatacacattaggtttgtagcacagggtttgtctagagtaagtgctgactaaacgtcagctgctggagatggtggcgataagaagttacttttattattatcaggactgcttgttccagtggctgttccagcctgacaaatcttccaaggcaaaaccagagttgctgaagttaacttttaaacatttcctttttttcctgagttatggaaggaatgataattggggaattcaggcttaaaatgaagcacctgtgatatgacgctctggaacgcctcttcatgcagagggtggttatgcgaagggaggaggttttattgcatatggggccttactggacagtgaagggagggggttcccagctctccctggtgggcccaggctagagcatgggtctcccagtcctcaccaaggggtctcagcctcagcaggttggcagccacacaacacagtgagatccttctgtgtagctgagcctctgattcccagaggtgaagatacagtcttagagtgtatcccagggaccctgtctttccagcgggaaactgcaggggctgagagaccaccccctagaggcttcctcatttgcatctttaacactgccatggttgggggctgttttcttcttcagcctgccctgcctgggctctgttgactactcagcctgttgttctgaagttctcctggccctttcagaggccatgggggctcaaaagccactcagaacacaagtccctcttcagctgctgggagtctgagcatgggaaaatccagcctgattttttccagttcccatgcaggtggtggcttcttcgactctcgcggtcttcttggtggaaacctttgtaggtcttaagtgcgctataattgagcactcttaaatgaccagacacagtggctcacgcctgtaatcccagcactttgggaggccaaggtgggcggatcacttgaggtcaggagttcgagaccagcccggccaacattgtgaaaccccgttttttactaaaaatacaaaaattagccaggcgtggtgacttgcgcctgtaatcctggctactcaggaggctgaggcaagagaattgcttgaacccgggaggtggaggttgcggtgagccgagattgtgccactgcacttcagcctgggtgacagagcaagacttcatctttaaaaaaaaaaaaaaaatgtgccttcatggacaggcacgatggcttatgccggtaatcccagcactttgggaggctgaggcaggaggatcacttgaggtcaggagttcgagaccagcctggccaatatggtgaaactctgcctctactaaaaatataaaaattagctgggtgtggcagcacatgcctgtaatcccagctacgtgggaggcagaggtgggagaattgcttgaacctgggagatggaagttacagtgagtccaaatcgtgccactacactccagcctgggcaacagagtaaggccctgtctcaaaaaacaaataaattaggcttcagatactgaactatctggcatatcctattttgggaccatgaaaagggtgacctggcaagtctgagaaggagaccttgtccctcattataatttttttttttttgagacacggtctcattctgttgcccaggttggagtgccatggtgcaatcacagctcaactactgccttgacctcctgggctcaaatgatcctcctccctcagcctcacaagtagctgggactacaggcatgcaccaccatgcccagctaattttaactttttttttttttttttttttttttttttttagtagaggtgggatctcactatgttgtctaggctggtcttaaactcctgggctaaagcagtcctcgcatttcagcctcccaaaatgctgggattacaggcattagccacggtgcccagccagaaattatgacttactcccaaggtcctgatgtccagaagcaagaactgaaagtgcggttgcgctgttatcattagtgggaaaacactcaggcacctggggccacatccggttctgcctctttctagctggtctagagtcttctctgagctgggctttttttcctatgcccattgcacagttacccatttattgcccagaaggtgacgggcactggatgcgttagatgctggggaaatagaggcacaaccatcacagtgtccttcttgtgagttttgaaggctggtggggagagacggatggtaaacagggaggtgaagacaaagccctctctttacaagcgaagtcagcacaagggacaggaagagcgcgcatgatgggtggtcaggaaaggcctctctgaggagctgatatttaggccgagatccgatgggaagaatcctctaggtggagaaggactatgcatccatcccccatgtataaaatgggaataatattagtacctgtgccgtgaggcagttgtgaaggtaaaatgaattagtgcgtgtgaagcacctatcttccactaaaaacagaaagctgttttagatgttgatattactattattatttttgagaaggagtttcgcttttgttgcgcacgctggagtgcatcgtcttgaggggtgctgcgcaaggcactagggtggttttaaacgcctttcgtcagctgtgtttggtgttgctacagcttcagtaaacacaagtgataaaacaacagccctcaaactgcacctgcccttccagaagatgacaaagatgtatgtagaacatcagagggtaccttgtgattattttattttatctatttatttttaaaatttcaagtagagatagggtctcactgtgttgcccaggctggtctaaaactcccagactcaagcgacccccatgcccttggcctctcagagagctggggttacaggcataagcccctgcactcggttgtgattctttcacttaacacatttattgataagttattacatgtcaggcccaggccagggtaggcaaaaatgagacaagctccctgtgcttatgaacatgttctcacgttccttactgtttcggggagaagggggttaagtgaacacttggggttgagagcaaagacccaaaggagaagacagattctgggagggaaggggcaagattagagagacctggttgtcatctactctctgttccttcctttcatgtggcctgggctcggtcacttcctctctgtcggctcgtgtcccctgatctgtgaagtgagaattacaacacctactttacagggctctcgtgagtattcagccagctagtgtgttaagctcttactcctgttaggattgcttcggccctctgtgcctcagtttcctcactggtgaggtcctttctgcctgatcaagtctgtggctcagtcagctcctcacttcctgcccctctggaggacatcccattagtctctcattccatcgtgctcttctctttgggagcattgtcatatggtggttatttatatttatgtgggcatttaatgtctctctttctcagactgtcagctctttgaaagggggctgtttgttccattcattgttcctgtgtcatgcatgatgactagcacataccaggtagaccatagatgctgtctgcatgggtgaatgccattcttcctctgcttgcatcttggggatactcatcggctgcacggaaatggagctccgaaggcctgagcttcaggaattatctgcttggtgggggctgtgtttctggaggcttcagtggcctgaacaatagccaggacagagccaactagccgggcataccttttctctgcagcagcaagccttgttggcactgtgggcagcaggaaatggttgaaataacttccatcatgatgccccttgtcatgagtttccatggaaactgagggctgctgagcctgtcactctggcataagggaggagtgtggagggcagcctcatgagaactggtatttaggtagaatatgaatagggggatttgattccttttccataagctagtgtgggctcatggattttttttttttttttttttttttactgtggtggggctctttgaatcacaaaaataaatacagctttttagtgagaacttagggtatttccaacactgtcatcttatttcatccttctaggcccaccatgaggcaggtgtaactccttcaatttgcagaggaagctgaggctcagagaggtccagtgacttgctcaagtctacacagcggggcatggcagagttcagatccacattctggtcggcctgactgtggggttcagtgggggttggcggtgcttgagcatggaagacaaagaccttgttgggtgccgggctgcttctagagatggatgtggtgggtggaggatggtttgtgttctttccagagtcagatggctgggcagagtcaggacatcctgggggtgttggattcccaggtgtggagtgacaacactgcctcatatccattttcagagctcatttctgaggcttcatctggtaccaaccctgtgaggcgaggatgctcctgcgaatccccttgtgcagccaggcttggagaagtcaaggatttggcttggggcacccaggaagcctgaggcttagctgggtggacctcctggctcctcgcccactgcttttcaccctgccctgaggtgtgagatcttcccagccacctctggaaggctggactctatcccagctcagttatttatgtatttattattattattattttttgagaccaagcttcgctctttcgcccaggctgtagtgcggtggcgctatctcggctcactgcaacctccgccttctggtttcaagcgaatctcctgcctcagcctcctgagcagctgggattacaggtacccaccaccatgcctggctaatttttgtatttttagcagagatgggggtttcaccatgttggccaggctggtctcgaactcctgaccttgtgatctgcccgcctcagcctcccaaagtgctgggattacagctgtgagccactgtgcctagccctagctcagttttaaaaattacatttagtaggtcttattttccattatcagagaaatgcagattcattctagaacctttggaaaagatagacaaacacaaaagaaaaatatctcccattgactaccctccagggagcactggacccaaactaggatctggttgcttttctgtgaagatgtcctatttcatctttaaggattatgatcttttaggtaatggaagttgtgcttcatattttaagaactttttaaaatgaactttatttcatatttaatttatatacaataaaaggcactcattttaagtacacagtttgatgcattttgacacatgtgtagacatgtgtaaccaccaccctaattgagacacagaacaccttccatcgcaggagagagggttccctcacttccctctgcagtctgcagccccccaccctccccagcatgcacactccctgccccaggctaccccaacctactttgagtcatccaggatttttccttggttttagaatttcataaacatggaatgaaacagtagactgtgttttgcattcgacttcttttgtgtgatgttctcaaggttcacccatgttgttgctagtgtcagtagtttttccttttctgttgctgagcagcattccagtgaccgaatataccactgcctactcccccattctcctcatgggagatcttgggcatatcagttttcccctctgtataatggggaaacattacccaattttttttttttgagacagagtctcactctattacccaggctggagtgcagtggcgcaatcttggcccactgcagcttccgcctcccaggttcaagcaatcctcccacctcagcctcctgagtagctgggattacaagtgcacaccatcatgcctggctaatttttgtatttttagtagaggcagggtctcatcatggtggctaggctagtctagaactcctgacgtcaaatgatccgcccacctcagcctcctgagtaggtgggattacaggtgcacaccatcatgcctggctaatttttgtgtttttagtagagatgggggcctcatcatgttggctaggctggtctagaactcctgacgtcaaatgatccgcccacctcagcctcctgagtagctgggattacaggtgcacaccatcatgcctggctaatttttgtatttttagtagagacagggtctcatcatgttggctaggctggtctagaactcctgatgtcaaatgatctgcccgcctcggcctcccaaagtgctgggattacaggcgtgcgtgagccgccgtgcctggccacattacccgctttatcagattgttgtggggattcagtgagttaacatgtgagtgattagaataatgcctggcacatagcagatgctaaatatcatagtaataataatggattgttgtctcttgctgtgtaacaaaccaccccaaggcatagtggtgaatactggaggtatttccagtttggggctcttgaataatatgagtgaatgaatgaaataatacaaatgtacatgtgtagttgggcagcctcggtggctgttgccttcctcgagggctcgaatgctgtgtgtcttggtgatcggctgacaggcagccgttgcctcttctaagatgggtggttttccttttgaggtgggtcctgggggctcctggctgctcagtgctggccctacttgttgccttgtgtgctgctctgagccaggcttggtcttgctgggctgaccaacccatttaagcctcaggaagtggcctctgtagaaaaaaatgtataagcagcgggtggtgaacagatcagtggagcgcagagccccaaaatagatctttctccgctaacttgccaagcaactgggggcagtggcaaatgctttgcataacttcctacccaaaagaaaaggttttactgcaaacaacttttggggacccctcccctctcaaataatctcagacagatccaagatgtttttttttttttccagagcagcacaaagagagagccagacaggcctggggttccatcccagatccaccatttgcaggctgtgtgattttgggcaaattccttaacttcgctgagccttctcttttcctgtgttaactagggaagatgagactagactctccagtgtgtatgcaaagcacccttacgctgcagagatgctgcaaatagggagtgtcttttttttcttcctttttcaattttatcctctgtgcttgccctagagcttgttatcaatttctcttagctttgtcaattgtggtggggtgtgggggattgagatttggctttcctgggaagatgttccaaaactgtctttgaaataatactctcctcctctgcagatcagtggacagggtgttgaagggtcggcataggtggtaagcatgattgatggcccccagagatgtccatgtcctgctccccggaacctgtgggtatgtcatgttacttggtaaagaggaccttgcagatgaaattaagtgaagaaggttgagatgggagagtattctgggttacccaggtggatccagtgtgttcacagggtccttttaagaaaaaggcggggctgggggcagtggctcatgcctgtaatcccagcactttgggaggccgaggcgggtggatcacctgaggtcagcagttcgagaccagcctggccaatatggcgaaaccccgtctccactaaaagtgcaaaaattaactgggcatggtggcgtgtacctgtaatcccagctactcagaaggctgaggcaggagaatcgcttgaacccgggaggtgaaggttgtagtgagtgaaccgagttcatgccgctgcactccagcctgggagacaagagcgagactccatctcaaaaaaaaaaaaaaaaaaaagaaaaaggcaggagatcagagtgagtagaagacaatggcaagatgatggcaacagaggttggaatgatgtgcttcaaaggcagaggaagaggccacacggccacgattgcaggcggccactgcaaggtgaaaatggccaggaagcaggttttccctcggagcctccagaaggagccagtgctgccgacaccttggttttagcccagtgagactggttttgacctaggagctgaaagctgataaatgtgtgttgctttaagccactgagtttgcagtaattggtgcagcagccgtagggcacttataaagcaggcgaggcctatgttggctgtggtttcacaggaaagtggcctcttggatgatggcgccttatggtcatttttatgtttcttcccttctgatctggatggattgttttcagttcagcctaggggaggtctggcttccccggggctttacctcgagactggatctctgcagtcaggcctctggtgagcccctgtggccggggcagctgcagcagagaggcttcctctctcgacagaaacgcagaagtgagctgcttgctcgcagaggccaggcttcctgtctggccagtccctgaaatgctgctccccacccctcgccccatgagagtccaggtgaagattgagtgggggtaggggctgcactgtctgatctctgaagtgagccccttcctgtctagcttggatttgtgttgaaggctttaagatgactgttttcttgtttatttacttttaagagacaggatctggctctgtcgcccaggctggagtgcagtagtgtgatcatagctcactgtagcctcaaactcctgggctcaagcgatcttcccgcctcagtctctcaagtagctgagactacagatgtgcaccaccatgcccagctaattttttttttttttccctgtagagacagggtctctctatgttgcccaggctggccttgaattcctggcctcaagcaatcccctgacctcggtgtcccaaagtgctgggattccaggcatgaaccactgcacccagacaattcttttcttttcttttttttccttccttcttttcttttcttttttcttccttcttttctttcctcccttccttcctttccttccatcctttcttccttccttcctcccttcctcctttccctttccctttccttccttccttcttttccttctttttctgtttctttttctttttcctttcctttcctttcctttcctttcctttcctttcctttcctgtcctgtcctgtcctgtcctgtcctttcctttctttccctccttccctccctccctccctctctttctctctttctttctttcatggagtttcactcttgtcacccaggctggagtgcaatggcgtgatctcagctcaccgcaacctccacctcccggcttcaagcaattctcctccctcagcctcccaagtaactaggattataggcatgcgtccccacacctggctaatttgtgtatttttagtagagacaaggtttcaccacgttggccaggctggtcttgaactcctgatcttaagtaatccacccacctcaacctcccaaagtgctgggattacaagcgtgagccactgcacatggccccagccacttattttcttgtgatttgtcagcaaacagcctctggggttgtgactgctggaaagcacctccagcttttgtggagccaggtgtggctggcacttttcgttgggatcatgtttggatctccctcagaccttctcaccatgttcctcgtgtgccacactggtgagataacggggtgtgggagagactgggcattcagattcagcggttataattaaagggcaacactgaggccaggatggctgggatcctctcgtagctgccatgtgacctctggcctttttgtccttccccatgatgtcacctttcattggatggtgactccctgcacatacccccaaaggtgtccatgtcctaatctttggaacctgtggatatgttacattatgtggcaaaggagatttttgcatgtgtgattaagggaaagatcttgagatggggagattctcctgcatgacccaggtaggcccaatgtaattacaaggatctttaaaagaggaaggtaggaggtcacagtcagggagagagagcaggattctggctttgaaggtggaggaaggggccacaagccaagaaatgcaggtggcctctagagctgggaaaggcaatgggtggattcccccttggagcctccagaaggaacacagccctgctgactccttggtcttagcccagcgagacccgttttggaaatcagacctgcataattgcaagatggtaaatttgtgttgttgtaagccactaggtttgtggggccatcctggcctcagtgatgcttatttgggagtgtgtttttttcctattactgctctaatcttttaaattagatctgaagagatgctctaatttttttttttttttttttttttgagacagagtctcactctgtcacccaggctggagtgcaatggcatgatcacagctcactgcaacctctgtctcctggattcaagccattctcttgcttcagcttcccaagtagctgggactacaggcatggcatgcgccagcacacctggctagttttttgtatttttagtagagacagggtttcaccatgttggccaggctggtctccaactcctgacctcaggtgttccacctgcctcggtctcccaaagtgctgggattataggcgtgagccaccgcgcccagcccgagatgctctaatcttttagagcagtaatagtaggttggtgcaaatgtaattgcagtttaattgtaactttaatggcaaaaattgtgacaacttttgcactcatctaataggaaacacactcccacgtaaccatctcctgagatccctttccttgacccattcggtaaatatttactgagcccctccacatgctggagactctgcttgtcaccagattgaccaaagcaaggtcttgtccttcaggggttcaagtcttaggaagacagagacaagatgacaaggctaagattgtcacatagggtgttaggtgcatcgtagagaaagaagacatagaaatcagatggcattggaccagagaaattttctcagatgtcagtgaaaggagctttgaacttggagcgagctctggaaatgttgtctggtcgcactgggtatctagtaaatatttcaaactcaacgtgtccaaaatggaatttgtcaccaaaacaacggagatctctgcctttaaaacctattcctccagttttccccattgtggtaagagataccaccatccagccaggtccccatgccagaaagctagagtcctcctcggcccctttgccaccttcatttctggcatcatgtccacctcctggttcttggggttcatcactgtttggagatgtgcttccctctgccacggcaaggctccaggatcctaggctcagagttgggggaaccgagaaaagcatcaagtatgatctgtgtcctcacctaggtgcagtaggaggtcagtgtaggggtccatgggcaggttccctgggctccagtttcagctctgcacttaccagtgtgaccttgaggtcaaagtgctcgacctcgtgtgcctcagtctcctcactgataaaatcgcaataatagtaggacctatctcacagcagtgttttagaattcaatgtaacaagcacttagaataacacatgttcagtcagtgatagtggtggttgttggaggaagcttctctacaatactcagtgcttcaaatggtgatagcagcagccactcattaaccacgtcctctcagtggtcttattaacctctgtccttggcgctttaaaaatcctcctcatgctttttgacgagtctacccattttatagatggggaaactgagtttcataaagtagcaagaaccttcccaaagccacttagctggaacagctttaccgtgattttctagtatgactctcaaggctgccggagacaattttgagtaattgctgggtttttaaaaagttcttcttctgtatccatttgaggtcttggtttatccctgctggagatccgcagaaccagcctcctgcctcctgtggatccgatgagatgactgaagataggacacttgatcctggacttgtttctacttccagcctccctgttcccctagggaatttcctcatgttttgcagattcctaagccccatgattgtgctgtggcctagggctgcatgtccttgttgaccttgcgctgaaataagactcaggggatgcccctcaacgggatgtgtggtaaggtgcatggttaatctcatacattatagaggattgctgggtttttttttttttggggacagggtctcactctgccactgaggctggagtgcagtggtgccactatcgctcactgcagcctcagcttcccaggatcaagtgatcttatctcagtctcccaagtacctgggaccacaggtgtatgctcccatgcgcagctattttttgtattttttttttggtagagctggggttttgccatgtttcccaggctgatctcgaactcctaggctcaaggagttcacctgtcttggcttcccaaagggctgggattacaggcatgagtcactgtacccggcctgcatttatttctttaaaatcctacttcctctgtttcagatgagggatcagaaacataaatacctgcaggcagctggataggtgacctaaataagagaagcaggttgtatctaggggacaaatgacaataaacacaggctgcacactgggaaagttctaagggtggtgggaaccgtggttaacggggagtcagtgcatgtgtgcctggtgtaaagtggacagatcctacgtcatgctgcaggctcagggtccacagatctgcagttggaaatgtaggttgttactgtgaaatctcctcatttaaaaaaaagcgttgacgccgccaggcacggtggttcatgcctgtaatcccagcactttgggaggccaaggtgggtggatcacctgaggtcgggagttcaagtccaacctgatcaacatggagaaaccccgtctctactaaaaatacaaaagtagccaggcatggtggcggatgcctgtaatcccagctctttgagaggctgaggaaggagaattgcttgcacctgggaggcggagcttgcactgagccgagatcatgccattgcactccagcctgcgcaacaagagcaaaactccgtctcaaaaaaaaaaaaaaaaaaaaaagttgactcattgaaacacacaaataagcaaaatgatcttcacctgacaaaacactcctgtaccctgatgcagttcccaggccaacaacttgtgaagtctgttccagactgttgagaaatgtcattttttttttttttttttttttttttttgagacagaatcttgctctgtcacccaggctggaatgcagtggtgtgatctcggctcactgcaagctccgcctcccaagtacacgccattctcctgcctcagcctcctgggactacaggtgcctgccaccacgcccggctaatttttttgtatttttagtagagactgggtttcaccatgttagccaggatggtctcgatctcctgacctcgtgatccacccatctcggcctcccaaagtggtgggattacaggcgtgagccaccgcacccggccaagaagcgtcatttttattctgtgctgtggtgtggtgcctcttcctttgcttttatgagctgcagttttgatcagcgagtccttgcgggtcagcagagggtcttgagaaaaggttgcttttacaaccttaagcaagttataaaagtcgtctgagactcagtttcctcatatagaagccagccgtcacagcctcagccttccgaagctgctgtgatgattgaacaatgtgacattttcctgagtgcctggtgaagtcgggtacatagaaggtttcaataaatgtgaatttctttccccttaacttgcattcctttttcttttctgaatgccgaggtgggtggatcatgagttcaggagataagaggctgtatcttaccaactgcattctgattttacaggagatcacagaatgaatttcctgtgtgggccatcctctcaaacattgctagtctcaggaatagtcagaaaagcacaggacctggcttttaatgatgacaaggactgccccctctgccctgtcttttttgtatctgtgattttcattcattaatggggtagttagtagtttttattttattttattttttttgagacggagtctggctctgtcacccaggctggagtgcagtggcacgatctcggctcactgcaacctctgtcttccgggttcaagcgattctcctgcctcagcctcctgagtagctgggattacatgcacacaccaacgtgcccggctaatttttgtatttttagtagagatgggatttcaccctgttggtcaggctggccttgaactcctgacttcaggtgatctgcccgcctcggcctcccaaagtgctgggattacaggcgtgagccaccgtgcctagccagtttcaccatgttgaccaggctagtctcgaactcctaagctcaggtgatccaccctccttggcctcccgaagtgttgggattacaggtgtgagccaccacacccggcccatttctctgttttatattgccatgatacctttgccaaaagtgagaaattaacattaccacatcgctatcaaagttccagaatttatttggactttaacagtttctcctcgtatgttctccttctgttccaggattcatccaggacaccacattgcacctagtttttgtttatttccatcgatatgtagaggtgtttctttcttttgaattgctgtagagcattccattggtgacaagagccattttgtccactctctcctgctgggcatttgtgctgagtccctttctcctttgaagttgcagagggtgctgtggtagctgtggatggggaaggaacctctgagtgggggggcgtgtgtatttccagcctcagtagtgagtgccaaatcgctctctagggggcttattctacctctcggtggcatccccactaggtgccaggcactttcctgctgtggacccatgaacgggcagtgctgtcttgccttcaaggagtggagagattaaatatataatagtggccgggtgcagtggctcatgcctataatctcagcactttgggaggctgaggcagggggatcacttgagcccagggatttgagaatagcctgggtaacatgatgaaaccctgtctctacaaaaagtacaaaaattagccaggcatgttggcacgcatctgtggtcccagctacttaggagtctgaggtgggaagatcacctaagcccaggaggttgaggctgtagtgagctgtgatcatgccactcactccagcagtgtcttgtctttttcttcttcttttttcttgagacagagtcttgctctgtggcccaggctggagggcagtggtgctacttttggctcactgcaacctccacttcttgggttcaagcgtttcttgtgcctcagccttccaagtagctgggattataggcgcatgccaccaccactggctaatttttgtatttttattagagacaggatttcaccacgttggccatgctggtcttggaactcctgacctcaagtgatccataggcctcagcctcccaaagtgctgggattacaggcataagcccccatgcctggtaagactgtgtcttaaaaaacaacaacaaaaaaatgtgtggggtgtgtgtgtgtgtgtgtgtatatatatatatacacacatatattttatatatgtatatatatgaatgaaatggcaaaatcatctgccaagggctgcagctgactccagaggaccctggaggagactgacagacacagtgtgtgatagtggagggggatgggaagggtgaggggggcatcgggcttctggatgactgagggtatatgcaagtgcagagacagcgtgactagaatgtccaggcaggagaggggagatggacaggcactgcgggtcatgagggtttcagagagcatacgcagtgtgtcccagctggtgacaaccttgctcttcctacaaccaaccatacacatttccatcttggggcctttgcatttactatttgctctgcctgaaatattctatctcagacatcagcccagatgtcaccacctctggggaggcctccctgataacaccttctatgagagcccctccctcctggtcacacaccatgctttgctcttctttggtttagtttttgtagcacttgtgattgccaagtgtaataaatattgacttgtctctgtctcctcctattagaatgtaattcttcgaggccaggaatttggtctgttttattcatagctgtatccccagctcccagaacagtgcctggcacgttggcttttacctactctttgttgacctaatggctgaatgaacggacgtgaccatcatcgtgagaatctgtggataatagcagcaaacatttaaacacaggctgtgcgccaggcactgcactaagcacttggccatgaacttggtctccttaaatcctcatgtcaatgccacgaaactggccctctctatttgtctcagttttacacctggggacatggtggggttagtatttgaacctcatccaaccccatactccagttgggacccctggctgggtctctggccagtgctgggaaagagggaggcaggtagatttcagccccaagctgtggagtccagcaggcatttgtaccccgagtgggactcagatccttgtgttagggggaacttaggccagaagtgcctgggctagagggtaatggggaccccaggaggctccccgctcttgccccaatcctgccttgtctgaaagggaaggaaggctcttaccttctagctgtctgcaacaggaactgccgggaggccacgctagccatcccccaactttggtttgcaaaactctgagcctggtggggaaatgaagggctggcttgctaaccacaaatgaagactcatttgcacaggcaaagcgggggcaggggtgactcctcttgccctagcggaagggactgacttctgcaggctgctgtcttgctggagccagtcatgccccaccattgagcctgggcactcggacacagttaccagcagtgggctttgtcgtcctccggcctcagtcttctcctttgataaatgggggggggaatagtgatattgtggcgattctgtggcactcaaatgaggaaatgcacataaagcctttgctcagtgcctgactcatggtgaatacttggggggatattcaccatcattgttaacagtggtagtggtcagaggtggcagtcaccatcagagcctctctcctgggctccgctccacatggcagccacattttaggaataatcctcagattaagcaaaagaggttaagtgaatattccctaatgcatgctcttcttttcctttttgagtagaatctgtccccaccctgcctttttttgagacacgatctcactctatcacccaggtgggagcgcagtggcatgatcacggctcactgcaacctctgtctcctgggttcaagctatcttcccacctcagcctcccaggtagctgggactactgatgtgcactaccatgcccagctaatttgtgtgtgtgtgtgtatgtattttttgtggagatgggattttgccgtgttgcccaggctggtcttaaactgcagagctgaagccattctcctgcctcagcctcccttagtgctgggattacaggcatgagccattgcgcccaggcagaatctaccattttaattacacttctgtgagtggtatgatatccagttgactgcgtgaggatcagatcccattcttgcaaagctagagaatgaggcagaggcctgccatccttgcagctagtgggagaccctgtgggtgacccattagccataagagagcaggctaagtgcccagataggaaggtgtcagcgtgtgaggcccaggcagccagtggtcagccgatacttgaaggcctcctgtgtgcccagcttgctgctggggccatgacagtaactgagggaaacaagtcacgcttgtgagatgtgatgaggacctggaaagggaagtccagaagcggaaggcaacctctcagagagggggtgtcttgtggggacttacagccaaggtgagggtgctttcctgctggcacccacctcgcagaacccattccttccctgagtctggtctgtgagaagagcccacagcatgaggataccacgtttggggttcagcaaccccagaatgaaaatcaccctttaaagaaggagtgctttacctttctgtgggggccacagcctggttgtgtgttagagtcactgggctctggagaagcttctggaggactggggccttctttcgcaatctgtccacacccccagggtcctttttcctggactgtggctccggtcggtacacgggtcctgagccagtattctggcccggggtggccgttccctgtgggtgaggaggaggcacctggaagcccctggcctctcctgttaatcactgacaaggtaaaaggatactcctgcctgtttttttttttttcaatttcaaaatttaaaaaaatcttttttttttttgagtcaggatttcactctgtcacccaggctggagtgcggtggtgtgatcacagctcactgtaccttccacctcctaggatcaagaaatgctcctacctcatcctcctgagtagctgggaccacaggcatgcaccactactcctggctaattattatatatatttttttgtagaggtgggaacttacagccaaggtgagggtgttgcctaggctggtctcggaattcctgggctcgagctgtcctcctgccttggcctcccaaagtggtggggttacaagcatgagccacggcgcccggcctcctgtgtgtcttgcctaacgattgcctttggcgatgggagtgctgaatgcttctggcatctctctgtctgcagaggcttacctgacttcaaaggaagcattcatctttagccagaagctagcaggttcaccccaaggttttctgagaggtcattcagggagcagctgctggaacgtgggaatggggacaggaggtaactggacttaccttgtctccgggccttccactgtgggccacccgcacagactaccctggtgtctttggcatcaaaacccagccaggtggccttgaatgggtgacttcatcttcctgggctgtctctggaaaatggggctttcttcccaagattggtgggaggattaaagagatgttgaggtcaactctgacacctattaaatgttcagtaagggggacctggtttgttctctgtcccagtaggtgtttctgccctgaacttgacctcggagggctcggtgttctgctggctgctggcagaattgtgagggcggtctgtgtgagagtcttagcccaggagccggcgcgggtggtgttggagaactctgggcctgcagctagactggcaggactcagaccccagcttgcccaacctgcctgagcctcagtttccccttctgcaaaatggagttgatgataatggtagttacttagggctttgggagagaccgctgagatgatggacagagagcactcgtcacgtggttgatagaccctggatctgcagagctgctgctgctgctgctgctgttgggagtttcagagctggggctccttgagggatgttcctgagaggaagattctggtaggacccacctgggacagggtgagatctgagcagggtggggaggagaacccactggaccaaggcatggctgccctttacaagggctcccaggacgaggacaatctcctttaacaaaacctcctgccagtccccagagcttcttggccatgagctgaggagtttttatttgttcctttggtcttttatggctaactctggattcctcttgggtggatggggaggcagccttggtccattgtagaactgggtactactgcaaaagtgccaagtccttgctgtaatctgctctctggagaacagaccctgtgggcaggggaaaggcccattgcccacctcctggtgtcatgaacactgtttttctcagtgggaggaggtggaggtacccaaagaggaggaagtggccttccaggtgccacttacttggtttggtgtcagctctgttattgattcactgtgtgaccttggacaagctccttgtctgctttgagccttagaattttatgtctgcaaaatgggtataataatgactcctctgtcgtagggtggctggcacgaaatgggataatttaggtgaagcagttaatatactaccttacgtacagctaacacttagtaagtagctgttataataataatgaagatggccgggtgtggtggctcacacctgtaatcccagcactttgggaggccaaagcgggcagatcacctgaggtcaggagtttgaaagcagcctggccaacatggcgaaaccccatctctaccaaaaatacaaaaattcgccgggtgtggtgacactacttgggaggctgaggtatgagaatcgcttaaacctgggaggtggaggttgctgtgagctgagattgtgccattgctctctagcctgggcgacagagcaagactcggtctcaaatataataataataataatcataataataatgataataattgaagataataggaaaaccatgttattacctatattagtgtcctgtggttgccataacacaagtgccacaaaatgagggacttaaaacagaaatgtacttattcccttgcagtgtggagcttagaagtctgaaatcaaggtgttggtagggcagtgctcccgctggaggctctaggggaggatccttcctctcctcttcctggcctctggtagctgctggtgaccctgggtgtcccttggctggtggatattggcactcccatctctccctctgagtgtgtctctgtccaaatttccctcttacaaggacagtagtcttgggttaggacccaccctaatccagcatgagctcatcttgactacatctgcaaagaccctatttccaaagaaggccacattcacacataccagggactggacttctatgtatgtttttgggggatgcagttcaacccccaacattacccgtttatactttctttccagggccaccaaggacaagaccagagtcattttcatcctgaattggtgtcaactagtgttttcataccctagagactatccaaatgacacagctgacccaatccctgcatttctcagagggggaaactgaggcccagggaggtaaaatgactctcccaaggtcacacagtaaggtagtggcagtgggactggatcgtggatctcctggtgccctgtattggcccacgtgtcagccatggactcgtattcccactggtggagccaagaggtttttgctgtctgcaggggagagcactttggatcttggcttctcgtttcatccttcccttggtagtggttaagagtgcaagctttgggccgggcaaggtgactcatgcctgtaattccagcactttgggagggtgaggtgggtggatcacctgaggtgaggagtttgagaccagcctggttaacatggtgaaacgccatctccaacaaaaatacaaaagttagccgggcatgatggcacactcctttggtcccagctccttaggagactgaggcaggagaatcgcttgaactcaggaggctgaggtgcagtgagctgagattgtgccactgcactccaacctcagcaacagagcaacactatgtctcaaaaacgagtgcaaactttggagcctggccattcaggttcaagttctggctcaaccattgtgaccttgaatgagtcagtgactctctctgcttcagcctccccacctgtggaaggaagacagtcatctcagccttacatgagtgcacaggtgtcaggacccctgctgtgcacacgggcatgtactcagtgtttctgtgcatgtggtttcccttccctttcctcctgtttggttttctctgaagccgaaaggtccttagtaggaagttgaggaccagcgttctccatgggaagactcaacatcagttacaactctagaatttattccaggccatccaagttaaggtagttgtctgtattttgagaacctttctcttgctgtaaaaagcaaacaaaaacaaaaaaagacaaactagcaaactcaaagaacgagaatacatatacatgcagtgctgcttcagatggaagtcagaaaagtgtgtgatcaaatgaaaggctgttgttgaaagggaagtctgcatttactcttctgccagttctcagactacctcaactccttgctgacattcctaggaattgtggtcccagctggcttctatagctgtgtgacctttgccttttccaaacgagtgggcaccctgcaggccacttcctctgggtttcagtgcccagcttatcaggaggctgcatgaacatctatttctagctgggcgggaaataggacgggtcctggcagaaggcggagcccagaggtggctggtagaatcccctgggaggagtaagggatgctctccgcagggacccccgtgtcgtgggtgccatggcaaagcgttaacaacaggcagtgcctagggagcctgaaccaaggttgggagtgtggtttccttctcagttccctttccgtcttcctgattatgacaagaacatctgtttggtaccaacatgtgttttttttttttttttttctccttgatgctgtgcatttttttccattggaatttttgttgagataattgaagaatcacataaagatgtaagaaatgatacagagagatctcatgtgaacgttacccaattatccccaatggtaatatcttgcaaacctgtagtgcagtatcacagccaggatattaacattcacaacattcatagaacccactaccagtcttattcagattttcccccattttccttgtacttgtgtgtatttagttatgtacaatttggtcacatgcatagcatcctatatctgccatcatagtcaagagactaaagcaatgtaatgatttcttacaccaattccatttccaaaattttaacatgtctgtctttgaaagatactaattttttttttttttgaggcggagtctggctctgttgcccaggctagagtgcactggcttgatcttggctcactgcaacctctgcctcctgggttcaagtgattctcttgcctcaacctcccagcttcccaagcacctgggactgtaggcacctgccaccatgcctggctaatgtttatatttttagtagagatggggtttcaccatgtttcccaggcaggttttgagctcctggcctcatgtgatctgcctgccttggcctcccaaagtgctgggattacaggcatgagccgccgttgccagcctgaaagatatgaaatgtctttattaaaatataacttgcagacataaaaaagaatgagttcatgtcctttgcagggacatggatgaagctggaagccatcattctcagcaaactaacacaggaacagaaaaccaaacgccgcatgttctcactcatcagtgggagttgaacaatgagaacacatggacagagggaggggaacatcacacaccagggcctgtcagggggtgggggcaaggggagggagagcgttaggacaaatacctaatgcctgcagggtttaaaacctagatgatgggttgataggtgcagcaagccaccatggcacaggtatgcctatgtaacaaacctgcacgttccgcacatgtatcccagaacttaaagtaaaattaaatatatatatatatatatatatatatgtaaataacatagatgtggtaaaatgcacacatggtgcatgtaaggctcaaggctttaagcatgggtccacctctgtggccattcctcgggtcccggtgacccagtcctctctttaggtgacaccactctgaccccatcagtgagtcttgcatggctaattggctttgtgcctctcttaaaggcttctcatttccctttatgactcacagaaccaagccgagggttttgcttccagcagacaactatttctaggtagaatttaatcatattgtcacgtttccactgattttattattttgcagttcctattgtatatggtgagtgttactggttttctttttgccaaaaacataaaatcactcttaacatacatcagttcaggtgaaaacggtgagttgatttaaagaaaactatcacataaatagtatcagcagtaggcagatacaacaaaccttataaggttgataaacaaatgtttgcagtttgagaaataatgtcatatggctccaaaccaccccccaaaactggtcaatccatgtgtgaggaaaaaaaaaaatctctatatagtctttgtataatgagagttttctgtgtaattttgatacacagtactggtttaaagaaaagcagaattagcctattaaaatattaataggctgtatataaagtaatgagcccttcctttattgccttaataatttttgttatatttgcataccatgagtactattttatatctaatacttattttaatattgattcactatttttaaacttaattttatatagaaaagaaacttgatttcatagtttagaggtgccaggtatgtattttttcaatatattttaaaatatactacagttaagacataacaaagggtgggcaccatttaaatttaattaccagcaggagggtgaaaaacaccaagtttaaatggcaccaaaatgatgaacatttaggctgggcatggtggctcatgcctgtaatcccaacacttggggaaaccaaaatgggaggatcacttgaggccagggatttgagaccagcctaggcaacatagtgagaccttgtctctactaaaaagagaaaacttaggtaggtgtgatggtgcatgcctgtagtcccagtcacctggctttgggaggctgaggcaggagggtcccttgagcctacgagttcaaggatgcagtgagctgtgattgtgccactgcactccagcctgggtgacagggcatgaccttgtctccaaaaaaacttaaagaattatttgatggcccatgctgggggtgttagtggtgagcacataaagctcctcattttctcattgtctcctgagtttggaaatgattgagaaatgaaacatcggcaatcaacgaagggcgatgagatggctgcctggagagcatgcttagaattgagccctgacagctggcccctgagctgcccaccctgtcatggcctgggtggatgcccataggtgtctcagagcagcagtcccagacttttttggcaccaggggccggttttgtggaagataacttttccatgggccagattggcctggggggatagtgtgaggatgattcaagggcattacattgattgtgtacttcatttatattatgattacattgtaatatataatgaaataattatacaactcaccgtaatatagaatcagtgggagacctgagcttgttttcctgcaactagacagttctatctgggagtgatgggagacagtgacagatcatcaggcattagattctcataaagagtgtacaacctgggtccctcacatgtgcagttctcaataaggtttgtgctgccatgagaatctaacgccgctgatgatctgacaggaggtggagctcaggcagtaatgttcgctagacccctgctcacctcctgctgtgcggctcgattcctaacgggccacagacaggtgccagttcatggcctggggattggggacccctgtcttggaggcagctcccttccgagtggcaaggaacagggcagggcacgtggtcccttgggggtggatccagctagaacaagatgaagaggctgagtatcctcagttcctttttccagggagtggtcccttcctcccttggggatggggagtcccagaggggagagaagcaccagtttccccagtatcacttaaaactcttatctattgaatagttctgcatgaatatgaagcattagaatcacagacctaattatttgagcataatgatctgggaagaatctcttcacatggaagcaggacactgattttcgcctctgctgtcagcgcagtggcaacaactctgttgtttattatctttttaacaaagaagataagggcaggcccaccccctatctgcaggccaaaaagtaaactttatttatttatttatttatttatttatttatttatttatttattgagatagagtctcactgagtcgcctaggctggagtgcagtggcatgatcttggctcacttcaacctccgtctcctgggctcaagccgttcttctcagcctcctgagtagctgggattacaggcacccaggcgcttactaccatgcccagctaatttttgtatttttagtagagacagcatttcactatgttggccaggctggtttcaaactcctgacctcaagtgatctgcccacttcggcctcccaaggtgctgggattacaggcatgaaccactgcgcccggctgtaaactttactttttgcaaagttttttttcagatatatctctatagggtgtatgttctttttccatttcatagatgagaaaatagacagtaagccagaatagaggcttcttcatacagccaggagagaaagagctggatttaactcatgcctgctagatccttctagagctgggctctttctgctctaccgtgtgtgcctcggaagccccttttgtcattacatgttcttctgctgtgtatctcacctattcccccagctgccatgtcagacgctgctacatgtgtgaagtaacctaacacctttggtttttcttaaagcagggtccttggctgagatcagtaagcaacgctggggctttttacttaaagtgaaaccaccagcagctgggaagctggtgttgcaaggtggtacagaaaaccattcagcctagtagctaaactcaccttggtggagccctcctggggccacgtgatttttatttcatgttatttcatttggtttgcatgacaactcaatgataagcatcactgcttgtacagcggaggaaacagcaaagagaagggatgcaacgtgcctggttcctgtgcacccctggggagcataagccaggatttgaaccaaggtctttgtactccagaactccctacaaagggaggctttctcctcttcttcccaggtgagctccagtctgcagaactcagccaggatgcatgtgctcagagaagcctttcttccccttgctggggaggagccccagtgtggactctgttgcactcctgatgtggatggagatgtggatattcacatatcatatgccggcctggacagggcctgtcctccctcccagactcggagccgtctgagggcaggactgtgtctgtctctgcagtgtggcatccctagcgctcagcgtggggttctgtgactgcctggttgactgaataactgaaagtcggaaaagaggttggggtatgtgtgggaaggtgcccaagccttctgtctgtctgtttgctcgcttgaatatgtcttgagcttccagagagaaatttttgttaagctcattgtcaggtgtggtgccccttgaggtcatgtatgggaattggggaaaaagccatgttcctggtgtcaggggtgggaggacgttccgtgggtgcagggagcctgagagagacagagaatcagtagcgggaggaggaaggaaatgggagcttgaagaacagggtcatggcccggccagcaaaggggtcggtggtgtaaagcggggagtgagaggaagctatgagacgtacggaggggccaaaagtccgcaaggctgtgccagaaggtgatgggtaggcagggagggctgagggagggtggctggagtggggtgccggcctttgaggctgactctaggagactcagtgtgtgggggtttgtttgcagggggtgggagtggaaggatgggtggtggaggtgcggtgacctggaagaccgagtgatgtggaaggggtgggtttcgaaatgagctctttcgaggtggtattcactttcagcggaatggccggggccactgaaatgtgccggttctgcccgcctggaaaaggggtgaatagctgaatgaccgaagtctaaatgcgctctaatggcagggcaacacgattgaagctgcnnnnnnnnnnnnnnnnnnnngcgtgtgtcttcggtttgtggtgggtgtggtgttggtctggtttgttgtctctctcgtgtctgtcgtgtgttgcgtgtgcctgtctgctgtccttggctgtggttgtcgtggtcgtgtgcgtggtgttgtgtgcggtgggcgtgttcttggttttttttttccttgggttttctggtgggtgtgttgtgttgttggtgctggtcgggggtctgcgggtgggggtgtctgggcggtgttgggctgtgtgttgtcggttttgtgtgtttgtgtgttttttttgttgttggtgtttgttgtggtttctttttacttgcttcgttgtctttttgtttgatgcgcttttcgtttgtgtccttggggtcggtggtttccttggggtggacctgggaagacccgaggtgatgctgggaagggggtggggttgtgcaaagatgaagcctcatttctgtggctgggttatctcactttcttcaagcaggaaactcggccactgagccccaccatgcaagagtgcatggcctgaggtctgctgaccacagcctactttgagaataaagtgttgtttcagtcactatgagcccttggcaaaaatttgaacccatgcagacaaagccctccttgaccatcatttgcccatctccttctcactagtagtgcctgttgtcagcaagttggtggaaatcttttggtaccctttctcacacctttacactcatacgtgcacacttacaaataggcacattccttcttagctgaatccagtacattcctgaaaacacactggagaggaacatttttggattgcaatatattacatcatattacacagagacaagcgctgatgcattaccaactgattgaaacaccccagccaatttccttagtatcacttaacaaccttaagtacctaaaatcagcctaccaatatttttcgcgtgaatacaaagcatctacagcaacaaatgcccaatttttgggtgctttgatgaacccattgctaagcatgtttgcaaaaagtacataggatactatacagtaatgtttctgaattaggatattcttctatcctccaactaccttgtactgtaatggaaaaaacaatgaaatgatctgcttaaaatactaaagattcatttaaattggaccctggttggtagtttgcttgtcagaagcaaatgctgggatgaaagaagaactcaatagaatgggcaggatgccgggtttgatgtgccgttggttgtgtgtctaactgcttctcttccattgcagacagacacgcctttcctttccttttctgtttctgtttccttttcctttttccttttcgtttttcttttgttttctttttctttctttctttttttttttgagaaggcgtcttgctctgtggcccaggctggagtgcagtggtgtgacgtcggctcactacaagctctgcctcccgggtttatgccattctcctgcctcagcctcccgagtagctgggactactggtgcccgccaccacacccggctgatttttttttttttttttttttttggtatttttagtagagacgaggtttcacgtgttagccaggatggtctctatctcctgacctcgtgatccacccgcctcggcctcccaaagtgctgggattacaggcgtgagccaccgcgcccgggcaccttttcatttttcttttcctttcttttctttcttctttcggatggagtttcactcttgttgcccaggccggagtgcagtggtgtgatcttggctcactgcaacctctgcacccccacaatgggttcaagtgattctcctgcctcagacttcctagtaactgcgattacaggtgcatgcccccatgcccggctaatttttgtatttttggtagagacagggttttgccatggtggccaggctggtctcaaactcccaacttcaagtgatctgcttgcctaggcctcccaaatcgctgggattaccggcgtgagccactgtgcctggcccacaccttcactgttttcattggcacctaggtgctcgtgaacctcgtacagcaggtctatgatctggattgtgcattttgcataaaaaaagagttaataagttatagtagacattcagatagtgagaatttgcatagtgatggacacttgtatataatatgtacatgtacacatggccatgtatgtgtgtacacacatggatgcatacatctagtctcctatttacacaggtcatcgaggagtttttgtcatgtcggtacataaggatctgcctccttaatgttcacagcaaataaattgagacaccatgttctttctttttttctgagacagggtcttgctctcttgccaggctggtgtgcagagttgtgattacagctcattgcagcctcaaactcctgggctcaagcaattctcctccctcaacttcttgagtagctgagactaccagtgtgcaccagcacacttggctaactgcgtttattttttgtatttttttttagagatggggtattgctttgttgcccaggttggtcttgaactctctggtttcaaatgatcctcctacttcaacctcccaaagtgctggaattataggcatgagccattgttccctgtcccgtgttatttcttatgccttatatgtgtccagcttgattcagttgctaacaagtacagagaagcttctacatctttgttttttttcccctacatttttgttttgccaggtactattttaattgacaaacacacatgtacagtcgcacactcatttaatccccacaagagcactgtgtggtaagtatcactatcactcctgttgttcacatgaagaagcagaggcacagagaattgaagttactgtccaaagctatctgctataagctggggagctgggactccaggttccagagtctgtccacctcatcagtagcgacactgctcctcatgacttggatagctcctgggaacatgaatttgcagcccctgcactagaatcttgttcccagcctcgggtcagaaaggtggcttgaatgcactgcgttgagcgcagtgggcctgaccgctctctgtgcagctctgcacccctgtgggtagtgggatcatcattcaccaagatgcccctgcctgatgtaagatcaaggggtggagatgtcaacaaaaatgcccaccgaccccctcagactttgctgaataccagatagaaaaccctggagagagctgcatattcttatgtggcttcttagagtcacttgcttgactatgagtcaaagttcaaatgctggctcttgcacttgtggctggtgaccctggccaaggtacttcacttctccacatctcagtttcctcatttgtaaaataggggcagtcatggtacctgcctcatagtgttcttgtgaggaacgatgagttaatacagaggatgctgttgtgccccactcagctcccattaccaggcttgtgctccatttcccagctgctaggagtgttgggtgtcgtggctcacaggtgccccttcttcagggcactgctctcactagaagaaatctgcatcacctaggaggttgtagtggctgtaagccaagccaatgactgactggcagggaggacaagaggactggcctcccttccttcaggaggacctacttttccggtgtgattcatgctccagacatccccccgccactccctatacagtcagggtgaagcccatccctaagtgggaccacagccttgtttagctttattctgctcgccatcccactcctgcactctcccagtaaacacttgagcaagaattcctgactcaggctcaacttccagggaaccaacctatgataacatgcaaaacattagcactctgcctaacacagagtaggtgctctgtaagagttttgctatatagcatttatttttatcctcaaggatgaggctactgtatctgtaagacccttgagggccaggatcaagtacatccagcagaacatcgggcttatggctaatgcttaaaaagatcatgagtagatagtccatgttcatggataggaagactcaatattttcaagataacagttcttcctggcttcatctatagattcaacacaatcccaaccaaaatctaatagagatacaagaaaaggtttttttcaattcacattcaatacagcacgaaacacttcacctcagagaaaggaaaaatcaaggtgtgttttttttctctttctctttcctcttccgtctgtactcaacacttttgacaccagatgtgtatggttttccccccacgcatcaagcaaacaattctccattggacaccagtttggtgtcctctagttcagttcaattctgatactatctacttggagctagaatcagattccacaggttgagagctcagtccctcaagactctgtcccatttcaggtgccagtcacaagcccaagttgtggcctatgcttttgactgactggctataaattggggttccaataacccactccttggatttgattaatttgctagaatggctgacacaactaagggaaacatgtataccagtttattaaaatgatattacaaaagataaagatgatcagcctgatagaagagatgcatagggcatagggttcccatgttctctctgggcatgccacccgccagaaacttccatgtgtttagcaaccaagaagctctctaagccctgtcatcttgggtttttatgagagcctaattacgaaggcatgattgattaaatcattggccattggtgaccaactcagtctttagcccctctctccttcctggacgttgggggtagggctgaaagttccaaccctctaatcacatcgttggttcccctggcagccaaccttcatcctgaggtatctaggagcccccagccctacaaaaagatacttatcactggagattccaagggtgttaggggttgtgtgccagaaaatggggttggagaccaaatatatgcagtcagtcctctgtatttgtggattctgcgtctgcggatttaagctatggtcgattgaaaatatttgagaaaattgcatcttactgaacatggacaaacttttttgttgtcattattccctgagcaatacagtataattatttacataacatttacattgtattaggtattaaaagtaatctagggatttaaggtatatggagggatgtgcataggctgtatgcaaattctctgccattttttatcagaggcttgagcatctatttggattttggtatctgtggaagatcctggaaccgatccccaacagtcactgagggatgactgtatatcttattaaaagtcacaatattacagaatcccagcaagttattctgtgggtagtgacaaagtgattccaaaggttatatggaaaggtggaagacatagactagcaaacacagcattgtagaacgaaatcagaggactgcaagacttactctaacgttccagtaatcagtacaggtgatgttggcagaagaatagaaagattagtagaacaggatcaagagcgcagaaatagacccacacaaatatcatcaactgatctttgacaaaggggcagaggccactcagtggagaaaggataatcatttcagaagtatgatgaataagctaatacttgtcttgggaagaagcaagagaggggtgttcaggatgataaagtcctggttgatgaaggcagatgcctgcagctctttcctggggcagggctggcttccaaagggtgcttgtttgggccctttggaagggggtgtgcggatgtgcagggctgcttgtatcattagaatggctgttagaatttcattctttctttcttaccatgctctgtctctctgcctttgtacatgtgcgtttgcatttctctccctccttgtctgggtaacctgtgcttttctgtacctggtctctctgtccctctctgtctcccttggtctcccttgtctcctcctctgtccttcttcctctctgtcccctgctctgctcagtcatcagtaatttgatccctcttgaggtccccatttctctctgtccctttcctctttccaagaactacttattgggccccgctgtgtgccagctactctgataggggtggagctcagtggtgaagaagggtgtacaatccctgcgtgtatggagcttacagtctaggaaaggagggctgtggatccacagattccatctaatacatatttgcctctgttgagtgctgtggaagagaggtgcttggtatagatcatagcaggcattgggaggttttctgagtttggtttgattgagctgagactggaagggagagcttggcactaaccagactaagaacattttcagtggtgccaacaacaccactaatgtcctatggtaggaatgagtgtgacctataagagatgcttggaggggcctgtgtgggtggtgcaagggctgggaggcagatgcttaggccacgtggggttggaggggtcatcacagggctgtggttcttagtccttacagcaatgggacgtcacgggaaggcttgatcccaaggagtggcatgagcctgtttgtatttcgtaaggtgactgtggggataacgtactgctttaaggagacaagtcaggaagctgcctccatagacaagagataatggtggcttggattgtggtgttggccatggaaatggatagacgttgacagattccagagcaatttcagaagtagaattgttaaaatctggctattgctggaagacaatgttacattgtctaaaaaagtttttctttagttatgtataatttttctgtaaggacagatgctcaccataggccagttcaaagatcccctcttggctgggcgtggtagcttatgcgtgtaatctctgtactttggaaggccgagacaggcggatcacctgaggtcaggagttcgagacaagcctgacctatatggtgaaaccctgtctctactagaaatacacatacacacacacaaattttccaggtctggtggcggatgcctgtaatcccagctactcgggaggctgaggcaggagaatcacttgaacccaggaggcggaggttgcactgagccaagattgtgccactgcactccagcctgggcaacaagagcaaaactctgtctcaaaaaaaaaaaaaaaaaaaaaaaaaaccaaaaaaattccctcttgaagacattttactgggaaagagaattgttagactagacagaaagagaaaagaatgtttgcttaaagtcactagactttcactggcagtcaactgggtgggtgaataactaactttggaaaacaaaccttaatacctttcaagtttttagataattgctaaagcagttatatcagccatgttgatttcctctaaaaatgaattccagtgcctagtgtctttaaaaagtcaaaggcacaagagaaaacaaaagtaaacaaggagactccgtaggattgaagatgtaatgacataatgagataagatgtatgcattttatttgtcttcaagtctactgtaaaaagatttggagaaaactggggaaatttaaatacagatgaggtgttaggttatgttatgtaattatcatcagttttgttaggtgtaaggttttatggttctataagaaagtgtgctcatttttttgagataaattaagtattttggggtgcaacatcatgaagtctgtaaaagtactcaagcttcccccagataaatgaaacaaacaaacaaaaaagtttcagtgcacgaaaaggatctttctgtttgtttgtttttgaggagtgaagataaagagaagagataaggaagactcagatttctggtttgggtgaagagtggcgacatgtccatcttttactgaccgtgcgttcttgggctctcagtgtgatagaaattgacaagaggtccaaagagttttcccagacaaggctttattggagcttatgcccaggcataagagaagcagcacaagagaaagagaattctcttcctggctccccgaagacagtcaggagaggaattttaaaggggctaaagtaggcagggagtgatatttaagcatgtagaagcggggaacttctggcacctgcacagtgtaacagcatagagagcttcttcctgtgttgcatatctcattagcgtgttaaatccccacccctaggcatgatgtttagtattataatgcagccaaggtggaggactggtcattcttcagatctcctgcacatgcgggcaatagggttaactcccttgagtaagatttaagatggggcccgcttatttttgtttcctcgaggtctgcaatcagtgggaatggccctttgaacaagatttatagtgcaaggtctggatggggtccccacttgttatgggtccccccagccagcttgtagtagaagtcctcagtggggtgtgacgggggatgagtcctttctctactttctctcaccttcatccctaatactctaccccacaaggtttagagataccacccccctaataatagggccacccataattgagaagtgtctttagttactttttattttgaaataattttagactcttgtggacctggcaaaaatagtacagtttctgtgaaccattcatttagctgctccagtgataacatctttcataaccatagttatcaaaacctggacatggtcgctggtgcagtgctattaatgaaactgcagatcttaattggttttcaccattttttacatacactccgttttcttgttattttgcatttgttttggtgtgtagttctacgaaatcttgtcacgtgtaggtgggtatgtctaccaccgtacatgcacaggatgtagatgacgtgctgtttttttactcttttcacatggcctttttgttgttgttgttgttgttgttgaggcgaagtctcactctgtcacccaggctggagtgcagtggcgtggtctcggctccctgcaacctccgcctcccgagttcaggcgattcttctgcctcatcctcccaagtagctggtacaactggcctgtgccaccaagcccagctactttttgtattcttactagagatggggtttcaccttgttggccaggctggtctcgaattcctgacctcaagtgatctgcccgccttggcctcccaaagtgctgggattacaggcgtgggccaccagtgcccggcttgttttcacatggcttttgcccactgagctgtttctaattgagctagacccacggtaagaactcagaaagctttgagtgcatcccatcccctctcctctaacttaattgtctgctctcctcctctagctcccattgttgcctgtgaatggccacgaacctctcctgtgtttcactatgactctaagatgcctttgctcacctctgtggacttcgttctgtcctcttccttaattccaggccacagccacctcttcttgctgcaaagctgagatctcctttctcactctcatctccaggagtgctggagttcaaaggtacaccagggtttgataacactttcttccatggtagacaaggtggtccctgccactcccaggctcatgttttaccagcttgggagcagccgtggaggggaggttttaccagtagtcctggccaaataagtcccaggaggatgctgatggtgcagctgggccatgtgtctgtccccgaaccagtcactgagccagggcacttgggtcattccctggcccctgctgtcgccttcagcttgtggttgaaggtggtgggggtgaatcagctctatctaaagcacatggaatgggtgcatcccatgaaaagatgattgttgttgtagtttttcagaagaaagggaaagaagggactggttgagcttgttgagcttgtgtctctgtgccagtccagagttcactggtcatcttgtagggggaaggaggagtcacctttgagtcagtcaggttgctatccttgcctggtaggttttgaccaggagtagatggagtcacatggcagcagaagttgcagaacggaaggatttcttacttgtttctgttatctattgctatacaacaaactatcccagtgtttagtggcttaagacaacaatcattttatttattgcacatatttctacaatctgggcatgggtggggactgggagagcttgtctgtgttccacatgttgtcagctggggcagctcactggggccagaggatccacttctaagatggtccagtgctctgtggctgttggctgggggctcagctgggctgttggctgagggcattgattcttcttccatggcctctccatagggctaacttgggcttcttacagcatggtggtctccaggtagtctgacttcttacacagaggctggcttcccccagagcacaaaatggaaggtaccaggccttcttaagtattaggccccaggctgggcccgctggctcacgcctgtaatcctagcactttgggaggctgaggtgggcagatcacttgaggtcaggaattcaagaccagcctggccaacatgatgaaaccccatctctactaaaaatacaaaaactagccgggcatagtggcacatgcctgtaatcccagctactcctgaggctgaggcaggataattgtttgaacctgggaggcagacgttgcagtgagctgagatcatgccactgcactccagactgggtgacagagtgagattctgtctcaaaaaaaaaaaacaaaacaacaaaaaaaaaccattagaccctgaactggtacagcatcatttatgccagcgtgccagtgctcctaacctttttggtaccagtgaccagtttcatagaagacagtttttccacagatggtgggggcagtggggggattgctttaggataaaactgttctacttcagatcatcaggcattagattccaataaggaccacacaacctggatccctcgcatgcgtagttcaccgtagggtttgcgcccctatgagaatctgatgccgctgctgatctgacagttggtggagctcagataatagtgcttacttgccggtaccagtccatggcctgggggttggggaatccctgatttatactacattttattggttaaaacaggtcacagagacaacctggattgaagggcagctggctatataaggcataaatactggaggctgtggcccattagtaacagtccattactctggactgttaccagagtcatagtttaccactctcttctcacaggccctgtgatatccagaacccctgttaccatccccaacgctggggttggcctcttattattatttttaatttgaatcagttagtgccttcatttcctcttccccctttaattgagccacagagcatttgtagcttttgggactcaagggaaaaggtcatcaaggtcaaggtcaaccggacagttgacctttaggctgcctagagtgatctctagtgagcatcaatttggtctcttgtttttttttggtagaatagtctgtgcttatttcctgaaatctcagttgcattacaaaaattaattgtcctagtttaaaatgtgtctgtctgagaaacagggtgagcggaaaccccaaactcttcagactccaggggtttgtggggtggcagcaaatgcccgggtagggtcttagccctttgtccatttccagaaggaggggacactgagtccagacgcagagatagctttgcgggatcctgttggggaaggaaggagccaggctgtgcctgggctgcagttgtgtggctgcatcctcaggtggagggaactccagcttctaattggctcatgttaatttcattttagtggatatcatggaaataaaagaaatccgcccagggaagaactccaaagatttcgagcgagcaaaagcagttcgccagaaagaagactgctgcttcaccatcctatatggcactcagttcgtcctcagcacgctcagcttggcaggtaggtgcatgtttctgtgcctttctccttccctgtgccttagtgtcttcctgaagaagttcgctaatagcagaatgctcacccctgcctgctcactgatgtgtatttggggtcatggttttgaatcccagccctgcccctttctagctgtgtgtctttaggtgagtgacttaacctctctgagctgcagtttgctcagctgtgaaatggggagaataataatgcctatttcatgggggtattgtgaggagtatgttaagtgtctctctggctcatgctgagagctgaataagtgatgattagatagttttaacactgaaggccaggctctgttggatgaaaaatgtacgctgggctcatccctgtaatcccagcactttgggagcctgaggcgggcagatcacttgaggtcaggagtttgagaccagcatggccaacatggtgaaaccctgtctctactaaaaatacaaaaactagctgggtgtggtggtgcgcacctgtagtcacagctatttgaaaggctgaggcacaagaattgcttgaaccagtgagccaagattgcatcactcccctacagtctgggtgacagagcaagactctgtctcaaaaaaaaaaaaaaaagagaagaaaaagaaaaatgtaacctgttttcttccagcagatgtggctcagcaaatctgattgatctgaaggaactgtcctgagatcttctgttgcacacacacatgcactttcctcactttactcaggggcagaagcttgtatctactttcaagttcagtcctagaatttattgacttagaagtatatgtatattaattaagaaaataaatacgattaaaatagaccaaagtgggtgaggcagctgtcaaagttgagcaatatagggacatttacttttcggtcaaataacttattaatttctcattcattcttttactacatgtcttttgagcctatactctgtgttaggttgtgtacatgccagtgagctaggaagatgaatgggacctggtgccgcctttaagaagctctcagtcgacttggggagacagatgtgtgtactgggataagacctagtgcaagcatgatacagtgtgctgtgaatgtttaattccagggaagcttggcagagaaggtgacttttacattgggttttgaggcttcagtaggagtttggaggaaagagagggagggtgctccagggaaaggctgtggtgtgtgccagggcttggaggagggaaatagcatgtcggatgtaggaaatgaggagcgaatgtctgactgatgatatggagggggagttggtagagatggggtaggagggcaaggcccgtggcggtgaagcttcacacctctgtctccttagccccacctgcaggctgagccctgaccccctgttcttaatttggtaaggagaccagaagaacccgggtcttggaagccaggatgtgaactttgatatatatcccactcttggtccctcttccggaaccctaaattcaaggtcagcacagtgatggtcaagattttgattcacattccatcttctcacttactggctctgagacaaactcagcccttcagagcctcagtttcctccgcatctgtgtgggaagatgagagcagcagtctctgccatgggtgtacggactgataaagtacctggtgcttaaggagaggcttcatagttccatgaggtgtttgcactgttagcttcattttacaggtgagatgaggcacagagtagggttaagtaacctcctgaatgttacacagccctgaagtggtgcagtgggacttgagctatgatcttccttttgccagatgccaagctcttaaccactcctcaatgccgcttattaacaagggtaatagcaaccatgggtattagcaagccatactctcctgggtattagcaagctctacttgctgtccctctgtgccatcttgattagaagcaggggagatactgacagctgcttagggttgtggtgcagattattccagattctgcattttattagttagcatagggttaaaagctaacactctttaataaaacaaaaagctaaatccctaagccagtggtactcatccatgggaagctgaatactgccctcccacgatgcccatgtcctaatcccgggaacttgtgaatatattatcctctatggaaaaggagacttggcgggtgtggttaaattgaggatcttgagatgggaaatatcctggactatctgggtgtctagtggaatcacaagggttcttagatacctgggaaggtcattcccagagaaagagatgtgaggatggaaacaaaggtcagcagatgagaggccatgagctaaggaatgtaggcagcctccagaagctgggaaaggtgagtaaacagattcttccccagagctttcagaaggaattcagagatctcatgcaaccagtctattttagacttctggcctctctaacagtctgaaaataaatctatattactttaagtcactaagtttgtggtcatttgttatagcagcagaggagactgatgactgaacctttgatatactttggcaccaggcaggtgtttccacctgttgatgtctccgtcatccctctcttctggtttaattactttagggtgggacctaagtattggggttttgaaaagccttcaagtgattctcctgagcagctggggttgagaaactctgctctggagttggacacctgggtttgaattcctcagctttttcatccctggagtcagtgtgctgccagggtaagataatggattcttgtttaaaatcctgtatcttccactgtctcagtgtgctctggctactgtaatgaaatgctgtagactgggggtttaaacatcaggcatttattttctcacaattctgggggctgggaatgccaagatcaagatgctggatggttgagttctggtgagggctctcttcctgacttgcagacagctgccttcttgccatgtgctcacatggcttttcctcagggtgtgcttggatagagagggagctctagtctctctttctcttctctaaaaaggcattaatcccctcatggaggccccactctcattacttcatctaaacctaaatacctcacaaaggccctacctcaggggttagagattcaacatatgaattcggaaggaatgcaaatattcagtctgtaatggctgctatgagctgtgtggccttggacacatgactgaacctgtcttaggttcagtggtttctccatgtgttaaatgggaatataatagtacttcccttgtgggatcaatataggaaaaacacttagaacaatgtctagtatatatatgtagttagtgctcaaatgatgttaacaatgtcatagtgatagttcccaccactccctccattcttagctgattccatttggcacaggaaataacccacttgtcatccctgtggtacaaagctcatcatgaatgtgtggccccatctcagacaaaaagcaggtcctagggccatgacggtgtgaaaggggatgctttctttgccttctgcaaaactagaaaccagcataggcttctcccatcttcgtgatctgtatggggcagggctttgtaagcagacgtcttcccaggaattaacacagcatttctgttccctttctccactccagctgactctaaagaggatgcagttaactggctctctggcttgaaaatcttacaccaggaagcgatgaatgcgtccacgcccaccattatcgagaggtagttggcttttgcctgttgatttgcgtagttgctcattcctttattctgctgcctttagccaacatgggctacaggggggaaaaaaaaaaagggacattggttttttgaggctcgttgagtgtcttgtatgcaatgggtgcctagtagcggtgtgggctctacagtttttcaaataagagcatttccctgtgctagttttcagcgttggcctattggagtgagtggtgcattggactcgagatagaaacattcctggggtatgtgctgggggaaaacagggcttccttcttaaaggatttaataagagattcagtggactgatcaaaggacagatacagggtctggaattttccacctatcactccctcctgggttgatgaagacctcaagactgtctcttcagtgtcatgggagtctagatgggcattggggtgtgagttattttccttccactaaatcaaagtcctctactttttactatttttctttctagctttttggggattaatgactatcatcagaaggaattgacaatgtaaagaaacctggcctttttgagttgaaatcttggcttagataggccttttccacactaggaggaaactgcttcccaagctgcccttgttagaaagttggaagactcctccttttggttccagttccttttgtgcacattccgtaggactcacttagacttgtgctattttctaattttctctttctctctttcttttgtctcatatttctttccagttggctgagaaagcagatatattctgtggatcaaaccagaagaaacaggtaagagtcattcagtttttttctgatcactttggatttcgatcctcattctatctttaaaccttccaagggggtgggagcatgacttgtcgggagcaaggtcctcactgcgtccattgtgatctgcggatgccatgttgggtcctggggttgaggatgacaaaatcctcctcctggagggagcctctattccgcagaaaattcaagtacagcctcagagatgatctctgccatggggcatttggacctcatcacaaatatttgagcacctttaaagtcctggtaatacagcagtaaccacactcctgatggcaccagcccatgctttgtgacaggagagagattgattgaccgtgaagaagtaaaccaggtggttcttttttttttttgagacggagtctcgctctttcgcccaggctggagtgcagtggcatgatctcagctcactgcgagctccgcctcctgggttcatgccattctcctgcctcagcctcccaagtacctaggactacaggcacccgccaccatgcccggctaattttttttgtatttttagtagagacagggtttcaccatgttcggcaggatggtcttgaactcctgaccttgtgatccgcccaccttggcctcccaaagtcctgggattacaggcatgagccaccgcgcccggccaccaggtggttctaagggctggtagagatgtgttgggtgatgtgataacgtatattcagtttacttgactttttcacttaaaagtacctcttggagaagctccctatcagtcctgcacaaagctctatgacggactattattattattttttagaggcagggtctctgtctgttgcccagactggagggcagtggcacagtcatagctcgctgcagccgtaaagtcctgggctcaaacgatcctcccgcctcagcctcctgagtagctgggaactacaggtgtgtttcaccatgcctggcttatttactattattattattattattattattattatttttttttttttttgtaaaggtgaagtcttacccagacatttttttttaaaaaaagcaaacgcagttttggtttttctttagattaatgcattgtcatttcggaaatcatttccgtgttgatgcacagagcgctgctcccaatcctttatcattactgtgattaatgctgctgtggaaacctttgggtctatctttctgtaaactcatttgagggagctgtgagtggggtaaattctcagaaacgaataccagcagcacagcgtttgctggtctaatagtttgatagcgagaggtagcaatttgtataatatttctaccagtggggcaagagggcaccctttcctgatgatttattgtgccattagactttgatctttgttcatctgcaaccgaggcaaccaagtgtttttgcttaaacttgctttctttatgggtgaggttgagcatttttaattcattatgtttttgaggtatgattcagctcttgataatgtaatgataaaaactaccatttggccaggcgcagtggtgtacacctatattcccagcactttgggaggcagaggcaggcagattgcctgagctcaggagttcgagaccagcctgggcaacacggtaaaaccctgtctctactaaaatacaaaaaattagccaggcatggtagcacgctcctgtagtcccagctactcagcctcaggaggctgaggcaggagaattgcttgaacccgggaggtggaggttgcagtgagccgagatcgcgccactctactgtggcctgggtgacagagcaagactccgtctcaaaaaagcaaaacaaaaccaaccaaacaaaaaacaacaaaaaaacccaccacgacaagaaaaaaccaaaaaaaccaaaaccaaaaccaaaaccaaaccctaccatttattgaacaaccgtgtatttggcatgccagggattgcattgagctcttcagtccttgtctcatgttagcctcacgtgaggcaccttatttttttggtaaaatattcctttcattcattcttgatttatttatgtcattatcctatgtggatatgtcattatcccatctagatgtgtcattatcctagttaatatccaataactaaactctgtcagctctcttattttgttcctgaaaatctttccatcttgaaggtgacttcgtgtctggtcagtgtcctctgttacttgttagcttcagggtttgggtgagcttccctggtttcttcacatgcccgatgggaggatttggaactattaactaggaagtggttaaaagtctagtaatgttaggtcagccattagctcactccatgtttttctgtccacctgcctttctctccgtcctcttcttctcatccaaaatgccctgcctgctccgccacgctgggccaccctctcgtgttactgaggtggatcaaatgaggtccttgtgttggaagatttggtacacactggtctctttcagcctcggaggtgatgcctcttctgacttttctttctctgtggcttatgatgattcatagctgagattggcacagggctgagagagggagccaccctcagtgcctctctccacgcggtgctggtatggtatggccaatctggctctgaagtcggctcttcgtttgtgaggtcaagaaatggataccaccctcttgctcaggaggcattctggcaagtcctgcatagagatccatcttcccatcggctggtccaggaccctctgcagagagaaacttttctgtttctggactgagttcatccctgtgtgctcaccggcttcctctcctctacctccctcccagtgggcagagccctgctctctgtcaacatgtggaaaatcccacctttcctgtggttctgggaagcctggagggagctttgcaaaagaaactttgaccaagatgccaatgaaagagcaactgacttctgtcctgccaatttccctccctttcctgtcacccacgagacgaatcgtgtttcctgaaggaaaacaaaggagccacagaggcagaggaaagactgaaggcgagagggggcaggctcagggctggcccagcccgggcaatggacaagtcttaggtgttttgcttggcccaagcacgctgtttcattttttgacttttctagaggcaaatggtagcagcgggcatttgtttacagccttctttgcagccgtggctgtaataagcactttacatccttaggatatgctcttggctgacggttgagctaggtgctctcagacacgttttctatgtgaggacactgaggcccagagaggttaagtgacttgactaaagcagcccaggttgtcaggggtggcaccagggtttgcagacttactttccccactggtgttgcttttccttttttcttttttctttttttaaatgtgctactggccgagcatggtggctgacacctgtaatcctaacagtttgggaggccaaggcgggtggatcgcttgagctcaggagttggagaccagcttgggcaacatggggaaaccctgtctatacagaaagtacaaaaaagttagctgggtgtagtggtgcacatttgtagtcctgctacttgagaggctgaggtgggaggatcatctgagcccagggaggtcaaggctgcagtgaaccatgattgtgccactgagctccagcctgggcaacagagtgagatcccatctcaaaaacaaaaacaaaacaaaacaaaaccaaaaacaacgaaaataaaaacaattgtgctgttgagagctgggggaaatgcagaaatcttcccttccccaccctgaccaatcaccttatgattaaaaaaaattaaaaacaaatgttaaaatttgttttattgtggtaacaacaatgaaacatagaacaacattgatcattttaaccgttcttagatatgtacttctgtgggatgaagtatatcatgttgtcatgctcccgtcaccaccatccatctccagaactttttatcatctcaaactgaggctctgcagccattaagcagtaactccccattgattctctctttagcccctggaaatcaccactctactgtctgtctctctggattggattgctccaggtacctcatataagtggactagcagaatattcgtccttttgtatctggcttatttcacttagtgtaatgtctccaagtttcatctgtgttgtagcatgtgttagaatcttcttcctttttaaggctgaataatattccattgtacagatagaccacattttgcttatctacttctccatcgatggacacttgagttgcttccacgttttggcaattgtgaatagtgctgctgcgaacatgggtgtacaaatctgtttgagtctctgctttaaattcctctgtgtatatatccagaagctgaattgctggatcagttgctggattgctgtgtatatatccagaagctgaattgctggatttattttgccggattgctatactgttttctgtagcagctacaccttcccaaggcagtgcacaggtttctgttttcttcatatcctcaccaacacttacttcctttccctcctctgcccttgcccccttggcgtataacattggatttgcataagtagaatgtgcacttccctttgtcctttagccctggcagggacagaggaactactctaccaggaggtggcaaagggtgagggggttgcaggtggaaggcaggtgggtgagtccatttatctcattcagcgtgaatgcaaataggcttcctatttgagactccagaatgttagagtcacctggggaagctttggcagagccacggcagtagtgattcgggttttactgttctgggcatggcctctggcgttgcaaattttttaaataagattcttctgtgaagctggggttgaaaattagggctgtctagagggcaattttcaaatctgagcatgcaccggaatcccctggaggatttgtgaaagtggaggctgctgggctccatctcacagtggctgattgagtaggtggtgggcagggctcaagaatttgcatttcaaccaatccccaggtgatgtagatgctgctggtctgggagctacttagagaagcagaactctggggctgcgctgtccagcagggcacccctcaccacaggtggccatttcaacaaaacaaaacaaaatgaaataaaatacttagctcctcagtggaactagctgcatttcaggggctcagcagccccgtgtggctagcagctactacctcagacagcacagatgtctccatcattgttgaaagttctgtcagatggtgctgaggtttaaatctcagatctcacactaactcattgtgtgaattggggtaaatgatttaatttctgtgggcctcagtttcctcatgtgtaaaagataaaataatagttcccgcctcccagggcagatgtgaggcttcaggagttaatatgtgaagggtgcgtggacctgcctggctcatggtaaacacttgacgaatgtttcttattgccattgttgctacaaaagagccgggggcagtggaggtgccggcccagcctcagcatggctggtaagtgtcacggggctgccatccttaatggtttggtgatggctgcctgggtgcgggagttgaagaaccctgggggcctcccgggctgagcagggaggacactgtgattgttcagtgctgtctgccatgggagagggaggggctgttggtaactcattcagggaatagttgccgtccttctccaaagggattcccttgtttcctaacccacagccctaggttgagctcccaggaaacatgatctgagacgcaggtttgtgtgcaggaggcttactagggagtgcagggtcatcaccctgggggaaggaaggcagctggaacaggcagctggggagtcacaaccatggcctgggcacacctgatggggagctctgagcatggcctgtggagctgtcctgaattgagactagagggccaggcctttgttcccttgcgtggactgggtcagagctggctgccttggaaggggctttgacctgggcgaggcactctctgtaggggatggcaggttgcagagaggggtgaagctgagccgttggcttcctcccctgcagcgatgggggctcagcctgcctgtgctggttttggtcgggctgtgcagcacgacacacacacatccagaggtgggagtgagggaggggctcgcctagggagaaagcgggtgaggctgtcccagagctaggagcccaaagaagctctcagcctccagtgtttacattgtaaggggaggcctttggaccaggtgggctcccatgtcccaggtgcttggatgctcaagcccctggttcctgggttttctccacttgttcttgagcagctgctctggcaccccaggcccctcagtctctctgttcctggacatgggatggttcctttgccctgctgctgtctgggctcctggggggccctggcctcttccttgctcccaggatgggctccactggggcaccagcatgagaggacgctggcctctcccttgctcccaggatgagctccactggggcagcagcgtgagaggacgctggcctctcccttgctcccaggatgggctccactgggcaccagcatgagaggacgctggcctctcccttgctcccagggtgagctccaactggggcaccagcatgagaggacgctggcctctcccttgctcccaggatgagctccactggggcaccagcatgagaggacgctggcctctccctttctcccaggatgggctccactggggcaccagcgtgagaggacgctggcctctcccttgctcccaggatgagctccactggggcaccagcatgagaggacgctggcctctcccttgctcccaggatgggctccactggggcaccagcatgagaggatgctggcctctcccttgctcccaggatgagctccactggggcaccagcgtgagaggacgctggcctctcccttgctcccaggatgggctccactgggcaccagcatgagaggacactggcctctcccttgctcccaggatgggctccactggggcaccagcatgatctggctcctctccccacgacccctctcgctgccgctctggtagcgcctgttcccactgctcctccaccttcatcctgccctggcccagctgttccttggaccactcccagggctgaggcagaaaggttcttgcaagcccctggggcaacttccctagcctgctggccgctgtgcccagccagccccagctggcccaacagggactttttctgccctcaaggtctgtctgtgaaagccgtgggtgctgtccctgtggtaccagtaagtgggtggggagcatcttgtcatttgaagtctgtgctgttacagaggcccttagaaccagaggaaaggctggaggtggggacacaggatggccagagtcacactggaccgtctccagggcagcggctgggcagtgacgtgctacttccttccgcatgccacagcagaagctgggaggatggtacagggaaactaggtggttttctcctgcaaggtggggcgagcttcctctcttgaccactctgtctcagctctgctggacacttggctccagccagaagggtctggatctcatattcttgacccacccaccccactaatttcacttctccttcttgtgtgagctactcgcttggaggcagtcaggtgtggtcattatgggcacactgggttggagtttgaggctagcacagataaggtaccaaactgatcggtgcctcagtttcctcacctggaagatggagatgatcatggtacctgccttgtaaaattgttcaaacatcaaacaggtgaatgtgcatataaggcaccacctagaacaacacctgtcacctgataagcactattgaagtttcagcttttgttactattgttactgctgctgctgctccttttgcctgggacgtgttctcccttgcttccctcccttttcttttttatttttggagatggagtctcgctctgtcacccaggctggagtgcagtggcgtgatctcggctcactgcaagctccgcctcccgaattcacgccattcttctgcctcagcctcctgagtagctgggactacaggcgcctgctaccatgcctggctaattttttttgtatttttagtagagacggggtttcaccgtgttagccaggatggtctcgatcctctgacctcgtgatccgcccgcctcagcctcccaaagtgctgggattacaggcgtgagccaccaccgtgcctggccctcgcttcccgcttcagctgaacctcactatgtggcttcgaagaaacactcatgcagattcctgtgaccgagcactggaatttgattcaaatccaggctctgctgcctgccatccagctctaagccctgagttgtgtacccatgtgacaccccacccttggctgttctgagccctgggggtcaaccatgtgtactttgcagaaggtagaatctggtgaacaattaggcaactttaatgcctggatgaccccagggcagcctggcacacagtaggtgctcatgtaggccttgttcctttccacttcccctccctggcccttagtgaccttgccttgctctgaaccccagtggcattaaaagaaacctttattttttttacttatttttgggggtgcagggggtccccacttactctgcatccctcttgtctcttcacagtgtcagactagagtcaaattcagctgggtctttcccggctgattctgccaagcccgtcctgtggttttggttcctctgggtggcaggtagagtcagtaggagtcttgttcatccattcatgtgtgtcgctaattaggtgacaaagcatttggctacatgaagagtgtcatagttactcctgatgtttacccaggcttcattgaatttcttcactttgacattcagagtcctgggcagaaatcacatcatgtcaacacctatattgggcctttggcatttctgtggcattttgtattgagattatctggtcatttgacatcattttctgcccacactgaatctcctgcaagaccttcctccatgaccattcctgaagggtggagaccagcccttctcactgggacatcaccctatactggggatctccagtgtaggtgcctcctcattggggcatcactgtacgctataaatctcttatgtgacctatgtccctggacatacctgaagggtggagaccagccctccttattggggcatcaccctaccctgtgagtctgctatgtgacccatgtccatggacattgcttgagccttgctcattgaagtgtcacccttaccttgactcaatgtcttgttcccagttagtggtccataaataactgttgaccaggctctctcatagagggctgcctgaggtgggaactgatgggagcagctaaatcctgtgctgttgaaaaccctcaaggtgacagagctgggtctccctcttttgcagcatcagtctccgagagttgaagaccatcttgcccctgatcaactttaaagtgagcagtgccaagttccttaaagataagtttgtggtaagtttcatggctcagcctgggaattttatgaatgcggagtgacttagcctctctcatgaagccgtggcttgcctttgagttccgtggaatagtgcacaagaaaatcctttgcctccagagtacatcttagttcagacagagggatcatagacatatctgaggaccatcgtctcaatcctagcagagaatgtaatcaataaagaccatgtttactgagctcttggacttggaacatctaccctcagacctgttttccattagtccagctttccctatttccctgaccatactgcagcccattttttccctagtgaaatgaatgcatgtatgtcttttggaaaatattatgaaagattccttgtgtagggtaccaggaccgtggcattttgtatgcaagtcctggtagtgtagctgtcagagttggctcttttttcttctgtttctccaaccatccatccttccatacatcattaaatttattttgttgtgtaatcaagttattggtgggtctgggcagtaaagccactccatgagtgatgggatatagtagagcaggtgaggcaaggatggagacaatgggcaccgatttttgcttacagggaaatactcattcttcttaggaaatgagcaaccctgcatccaaacagccccagttggaggactccaatgcccattttcaatatcagctccattacaaggttcctcagtgcaaaaagctcatttcatttttgtattaatgagctcctggaaaaattatcccattttattgcttatcaagcatcctttgacctgcccccaatattccacattaatccaataatagaaaaagagaaaagggtaggtcagaagaggagagagatgggagaagcatttaccattgattgctacacagttgccatttaattctttatcaagtatttactgaaccaggtgttttgcaggtatgttgttcactttcagggaagccctaggagcatagtagtggttctcccattttacaggtaaagaaaactgagggtttgaaagggtcaaggaaattgcccaaagccataaagcaattaattggagctgagttctgtctgactcccaatgctttacaaaatgacctatatgtacgtactctacaaatatgtctgaagttggaagtccaaagagagtgttttctgcccaaaaaaggaggagttacgcatcatgtctcttggaaacctggctgagactcttcccttttggggctcaaaggagggtcttacttggtaggtgtctctgtgagtatgttttcccagacagggggattagggaacgtgtggagggttttgattcagaggaatatgaatttgattttagccaatgttgtagaaaagccatgttaaatagcatgactttttcctttcaaaagccatgacactgaaacaatgtggtcatagctgtctcttcagcatgccaataaaatagcatgccatttctgaaacaaaaattattctataaatagcatggagccattcttacggtggacatcaaaaatcatgtggtcacttttttcatatttacaggaaataggagcacacaaagatgagctcagctttgaacagttccatctcttctataaaaaacttatgtttgaacagcaaaaatcggtaagatgattcttgagcaagtgatcaagtgatgtttctgttttccatgtatttccaagtctggcatgttcctaagaaacccacaagaagtgttgaatctccattttagtcaaggaaacataaatgagaatgatgaaagcataccattttcatccattagattggcaaaaatctttaaccatgacagagctgtgggcaaaatgtagagaaatggtgttcatatgccttcctggtggaaatgcgaatggccataagtttgattggaatttgatctgagtctgttaaaaaagtgcaactcactctactgcattatttcattctgaaaggaaatttagcaaatggctgttattattaatagccatctccagattgaggaattatatatatgtttcttctttttacacgtttgtttgtttgttttgagatagagtctcactctgttgcccaggctggagtgcagtggtgtgatcttggttcactgcaacctttgcctcccgggttcaagcgattcttgtgccttagcctccccagtagctgggattgcagacgtgcgccaccacgcccagctaattttgtatttttagtagagatggggttttgccacattgggtgggcaggtctcgaacttctaacctcaactgatccgcccgcctccacttcctaaagtgctgggattacaggtgtgagccactgtgcccagccctttatatgcttttattcatattttttatgagggcatattttttgattaaaacaatagactatttaaaaattaagagggtgtatgttttgatctgacagtggcatcctggggactctgttttatgaaagggaaaacatcggggcctgagaatatattatcggattgcttattgcagcattacttatgctggcaaagtacctgggcaccatctgaatgtctctcaatggaggaattgctgggtaaattatggtctatccatattatgtgacattatgcagctgattaagaagcatgtgtcagttctctttccattaatctgagatgatatttgtgacattttgtgatgaaagccagcagcagatttacatcaggagtcaggtctgctattttgttaaaaatcatagaatacaggccaggtgcagtggttgacgcctgtaaccccagcactttgggagcccaggcgggtggatcatttgaggtcaggagtttgagatgagcctggtcaacatggcaaaaccccatctctactaaaaatacaaaaattagccaggcatggtggtgtgcacccgtaatcccagctacttgggagggtaaggcaggagaatcacttgaacctgggaggcggaggttgcagtgagccgagattgcactactgcactccagcctgggcaacagagtgagactccatctcaaaacaaacacaaaaacagagaatgcaataatcctccttttgctcctttttatgagcaaggggagagtatggaagaaagcacctcacatttaatgttgattttgtgtgtgtgtgctggaaggggttgggaagataggcaggaaggatagttaccttttctttgcacagctcattttctgtgatatgttccaagtaacatgttacctttgcaataaaaagttccatagagcataaagttttaaaattgagactattctgtgcgatgcacctagcacagtacctggtaggtggcacacattcaataagtaggggctgctgttgttgctgtcaggaaagggctttgcagactgcaaaagagttcccagagaaaggtgtgagggcttggggagtacctggaacttggagtcaggtggctgtggtttctgcagttagctgcatgatcttggatgaaccactgactgctcctagcctcagtcttctcctctgtgcaatgggaggttgggagttgtgaagacaggcatttttaagtgatgagcatgaatgttcctagaagacagtcattaattgctttctgcatgcagagctgtgggctggccacacagtgaggccacctgatgggtgaccactggccgtgggactttggatgtatctgagttagagaaatgggagggccatttcctatctgcccagatttggggaaaacatatttcttagagtggatcattgaattgcaatgtgttcattttttctcatatataataattagttatttgtttgccaaatgaaatagaaagattgcaggcttgggagttgggagaactggattctagacccacttgacctctaactgaccaagtaatgttgggggaagccatctctgtcctctcacttagccttttctataaaatgaaggtattaaatgagatcaatggttataaaacttttaatactctttaatcccctctcctttagacaggaaactgtaacaaccacaacaaaaaccatgattcataaaagcttatcagaatactttttaaggttaaaacctgtaactttaaaaatagtccttgagaacaatgacgtgtgtcattgaacatagaacatgtcatagaataatgatgacagtgtgcgtatgaaatttggaatggtgacgattgtcatcttatgcaattgaccaggattgagaaaagctcgatttactcaagataagtagttgcaaataacagtttttttttttttaataatagtttaccttgaaatttcaagatgctgtgttgtcagacagatgtcaggcaaagtttgaaaataagatttgcacatggctgggagcagtagctcacgcctgtaatcccaccactttgggaggccaaggcaggaggatcctttgagctcaggagtttgagactagcctgggcaacatagtgagacctagtctgtattattaaataatattaaaaattaaaaaaagaagatttgcacaaaagctgtttcacctgctaccagattaacccattcattgatggtttccactgtggtaacattccacataagaggtatttcaacctgtactttaattatggctcttattaaggctagtctgtgtgtttgtgtctatgagggagaaacataaattggaatcagagttttacaaaatgtcagaaccctctggggtgccctagattgccccgtgtggaactttgtatggcaaagattctgccgataccaaaggttgacccctggtggccagaatgccacattgagcctgcccctggttgtacttgatctaatggtttaaatatgttaaaaattaattgcctacgtttaaaacttgagagattatattatatattaaaatctagatatttggcttcccttaggaaaaaaatcgagatctggctataaatagggtcacatctcgccatggaacggtccacgttctctgtattgacccagccccatacagctctgtctgctcatttatgttgcttacctgaccccaaagaagttttgctttggcaaccctcatctccactgtttgagggtataactctccagtttggtcactgcattttaaaaatttaatttagtgacagatttgaataacaaagtcccaagctatgtagatggcttctggccagctctaagaacctcactgctgttgtgtaggtaaatgcccatcccctaacctgttagcaaattgtttacttcctgttcctggctggaagcacagggcagagaaaagtacctgttttgtgatttggggggaatgagggcctagctggatttctcaggctcctgcaggagacagagctatttatggtgacttataatccccagaactaaatccagggagtgggttcatgcttatcagcagccaaatggtttccatcgtgagcttgctagttcctctttgtgtctaaccacctgcctacgttccacctctcgagcttcagagtttccaaaagtttggcagcagcaggaggataagaaatgtaatctcacgtttgtgtctccctggtgaggggatatacctctaactaggctgtaataacagtatcattaacaaagatgatagccaacattttctcaggtggactatttgctaggcactatcctatgtgtttttttttttttttttttttttttttttatttgagacagagtctttctctgttgcccaggctggagtgcaatggcacgatcttgattcactgcaacctcttccttccgggttcaagcgattctcctgcctcagccttctgagtagctgggattacaggcatgcaccatcacgcctggctaatttttgtatttttaattgaaacggggtttcaccgtgttggccaggctagtctcgaactcctgacctcaggtgatcctcccgccttggcctcccaaggtgctgggattacaggtgtgagccatcatgcccaacctgctctatgtgttttgtatacatttaattcccccctagaggcctgtgcaagagctactgttgttattgccattttagggattaagaaactgaggtccagagaggttactttgctgaaggcctgtttactgcagggtagtaagctgcagagctaggatttgattttctgcccaactttgacgcatagccatggaatacttcttaatttttgaatcctttgtattaaagaaaatgtaaagcatatagaagtagagagaatagcgtaacagacccccatgtatcatcagctgacttcagccattatcaccttgtcactgccctcacccaagtcccttttctcacactttgcagcagacatcaagcagcgtatcaggtcatctgccaatactgtaatttaatacctggctacgtgactgctaccctgctacctcctgatcaaacctgtgaagtcccctgtggttacagcattcttacataaaaatagaaagcacttgcaaaaaatcaaaaagaaaattgagaaggctgctaacgtatctctggttgttcctatgatccagtaaggcattgaaggattattctgccggattttacatgggtgtgagcatgggggaagtgagtgatgagcgttctgtgacgatgtttgtggaggagctcagagatcttgcagtttattcttattgtcagtggctggcaagaggagagtccacagtggagaagttagatagaatctctggttagcttttctttttctttctttttttttttttttttttttgtttttgagacagggtctcactttgtcaccgaggctggggtgcagtggtacaatcatggctcactgcagcctcgaactccctggctcagatgattctcccacctcagcctccggagtacctgggaccacaggcgtgtgccaccatgcaggctaatttttgtattttttgtagagacagtttcaccatgttacccgggctaggcttgaactcctgggctcaagtgatccacccgccttggcctcccatagtgctgggattatagacatgagccactgtgcctggcctagcttttctattgatgagattttacccttggccttccagaaccaaatggttgctacagcctaagtaccactgagtgcgtaagaccagcttcggttgtgaaagggcgtgtgccttcagccacgtgggaaaactccattcctttccctccctttcttagtgccctggcccctgcttctgtgacccccgcctctggcatggccccttctcttgtccagctggtaacttctcctggggcccgactcagagatgacatttccctgtagccttttagctaccagaagaaattagtttatctattattttagtcactcatccagtaaatgtgtgcgtgacccaagaggcacagtggttaacaatacagctgtttctcctgacctcactggccctttgctggggtgggaaggtcctgggatgttgcccagagtgacataaggcccagtgccacccctgtcccttggttaggtagaatctgaccacataaccctccatggtaatgccgaacataaattaactgctgcctccacggtgcacccgtagcatctagaatattctgtgattgctggaatctcatttattgtgtgtacatatgtacgtgtagtgtgggatgctagagatttaccaaggtgggcctgggttgaaattctggcccttggacttgttaggagaaaagtccttgcctccctgggcctgtttcttgtttctgaaatggggcttattttactacctgatgggatcagcaggaggagtgactgagactgtcaccgtcttgccccagctcatggagcccatgttcatttcctggggccgctgtggcaagtactgcaactcgtggcttaaaaataacagaagtgtcgggcacggtggctcacgcctgtaatcccagcactttgggaggccaaggcgggcggatcgcgaggtcaggagatcgagaccatcctggctgacacggtgaaaccctgtctctactaaaaatacaaaaaaaattagctgggcatagtggcgggtgcctgtagtcccagctacttgggaggctgaggcaggagaatggcgtgaacctggaggcggagcttacagtgagccgagattgcgccactgcactccagcctgggcgacacagcgagactccgtctcaaacaaacaaaacaacaaaacacagaagtttattccctcactgtactggaggttaaaagtccaaaatccaggtgttggcagggccacacccctcggaaggctccagggaaggatgtgttccagacatctttcatggcttctagtggctgccagcaatgcttcaagcattcctcggagtgtggacaccgcctggctgctggtggctgccagcagtcctacaagtgttcctcggtgtgtagatggcattgctctttggtgtgcagacaccatcactcctcggcatgtaggcgtcatcgcttcttggcgtgtagatgtcattgcatcgctccttggcttgtagatgtcattgcatcgctccttggcttgtagatgtcattgcatcgctccttggcttgtagatgtcattgcatcgctccttggcttgtagatgtcattgtgccagtctctgcctccatcatcacatggaccccttttctctgtgtgcttctctgtctccaaatctccctcttttttttttaattttttttttttttttttttttttttgagagggagtctcgctctgtcacccaggctggagtgtagtggcgccatctcggctcactgcaagctctgcctcccgggttcacgccattcttctgcctcagcctcccgagtagctggggactacaggcgcccaccaccacgcctggctaattttttgtatttttttagtagagatggggtttcactgtgttagccaggatggtctccatctcctgacctagtgatccgcctgcctcggcctcacaaagtgctgggattacaggtgtgagccaccgtgcccggcccaaatctccctcttttaagaagccaggcactggattcgggtccaccctaacccagcaaggcctcatcttaacttgattgcaccttgcaaagaccctaattccaaagaaggtcatgcccatgggtactgggtattaggacttggacatatattcccggggacaccatcctatacataatactagctataactttttctatctttagaacgtcttccttgatcacctgtgccccatactgtcaactacagccccatttatctgccccctttaaagtaacctactccaagagctgtctacgcttcccttcttcctactgtctcttgagtctattcccgtcttgtttccatccctgcctcctagagcacttcatcttggcacgtcagccatcacctccatgtgttgcgaatccagaagtctgccccgtggtctttatcttgtccactcagcagcacgtgtcaaagctggtcactctctccttgatgttgtaacttgcctttgggatgcccgactgtcttccttatcttgcctctcactgttggttctcttgcagcgtttgtggctcttggctttcatttgttctttttcattctctgtcctgctctgcgtcccaggggccgattcctgcaaacacgttcccaggtgcctgtgccaatgagcttccggttgcttcaacaagcagagtgtccgggcagggagttgcaagacctggcagaggaggggaagccaggtctttcctggttctgggagcatctgtaccatggtggtacctctgccattgtccgagctccctgagtgggggaatgcggtgcgggctttttctgtgctttgttgaaaggaatgtaaaggaaggagagggctgaagaattgcatgtggtggtcagtgaggggggccacacactgggctccctccagatgtaaataagctgggtgtggggctttgggcttggaagtgttctagcccctgatgccttcagcagcaggctgacttggtgacctaagcagtaaatgagtccaaatagcaacatgccctgtctaaaatctgcaacaccacccctttttaaaaagaaatacctatgctgtaaattacacatcaacgaaaggaagtacttctcagtttgcctaaaaaggctaagtttgcggctcttaaccttttggtgggacctactcctttgagatgctgattatgtctccagaagaaacacacacccacacaaactgatgtggactctctgatgcttctcagaggcctgcgattccctttctagaaccctgatagtccccatgacgtcctgggctgcaaggagttcagcaagaggaccctgggtcatctggggtaggagatgttttatgtcgttagcattgatcatgtgatagtggatacatttccctaagtgcttatccaatcgcagtgtcattgaagactgttgaagcaaggctacctgggcagaaatggacaagatgtgggtgtgcagggtgcctgtgtacaatgcacagaaaatgggctggtgcaagtagaagctggagggaggggtgctccatggcgccccccttggtggaagagcctcttcatcatgcaacagttggcacggcagtgggctgtgaagagaggagctgaagcagtccgatatttctttcgtcttcttgccttcgaagattagaaatgcatctttgaaatactaaagatttgaaatgttgcctgtaatcccagctactgagggggctcaggagggagcatctcttgaggccaggagttcaagaccatcctgggcaacatagtaagacctgcatctctacaaaaagaaaaaatattagccgggcatggtggcgcatgcctgtagtcctagttacgcaggaagctaatacaggaagatcatgtgagctcaggagagtgaggctgtggtgaactatggtcgtgccactgcactccagcctgggtaacagtgagaccccatctctaaagaaacctggcagtgaggatatagaaaaaggtatgtgtaccccagtggaggtgcctatctcaactgttttgagagcaccttggcagaatttatcaaagccaatgtgcctacaatgtgctgtgtctacgcgcttttccttctaggactctactctgtagaaaaactggcacaagtgggcaaagatagagaaataggcacacagggacacttaaaaataatactagatgttacaaaaatcaagtgacatgcttattgtggaatacaatggtttttcaaagaaaggaaacagggttatttgaggttgcagaataatatgtaaagcttgaaacacagcaaaaaattgtgagatgtacgtaaatgttataatatgatatgataccattaaatgaatatccctaaaacaaattctagaaggaaacctatgaaatgcttaagggtgactgcttcttgggaatacgactgtggagggaatgaggagggcttctaccttttgcttcttaagtttctgttatatttgaatatttacaactaacatcaactaaaatgatatttttaatgatcttgttgcatctgacaaaatgatgcttttttaacaacaaaaatctttccgtttttgcattaagtgacttgtctaaggttcttttttttgtgtgtgctttccatttcagattctcgatgaattcaaaaaggattcgtccgtgttcatcctggggtgaggcagctcttgtgtgtcgttcggggcggctgtgccggacctcggtgcctggtgcccagccggcctccaggaggggatgcctgtgtgtgcaggcgctgacctccaaaggggcagggggcccctgctggggaattggccatcccatgcctgtggcgtggatagagatgagcagtagcaacaggaaggtgtggagcactgggaggatggtccagaaagttctgtagaaaagcctgtgtgcctcagggcctcctttccccgaatgtgcctcatgagatgtgacaggttaatagtttttttttttaattacaaaaactaatgttaatgatcaaataagtgaaaaattccttgttaaacaggtttaactgaattaaaatgagttcaggtgtataaactgcttcacatgatgcttggcacccatgaggggctgatagatagtaatattattactaaaaagtcagagttgcaggacttatcaggacattcactgtgcctcatgatttcccaagtggggaatttctgagatgttatgtgtttccccagcctatctgactgggagaaatgttggccctggagttaatggtctggggtacgttgatccagtctttatcggtgagcaacttttccctctgtcacttttgaaatcagaaactccaagactccaaagtataaataaaatgaatctaatttttatatagtatgtatattcgagacggagcctccctttgtcgcctaggctggagtgcactggcgcaatcttggctcactgcaacctccaccttccaggttcaagcgattctcctgcctcatcctccgaatagctgggactacaggcatccatcatgtccagctattgttttttttttttttgtatttttggtagagatggggtttcaccatgttggccagtctggtgttgaactcatgacctcaggtgatccacctgccttggcctcccgaagtgctgggattacaggcatgtgccactgtgcccagccataatttctatgtagtattttaatgaaaacttagtgttagactgtgaggctggtggggaaaggttagaattgtactcataatcaaagacaacagactcctggaccctgagtgtttagtaaagggagaaagctcagggcatgtttcatctcttacactatttgaaatagacctcttttccccaggctcctgcaagtgctcagggaaacatacccattaccctgggaagccccgtgtagcagaatgtactccccatccaacccgggggtggctcgtgctggcccagtgaggccctgtttttctggtggcctgctggccaaggcgggagtcctgcctttattcggagtgtagtgttccctagtgttccctacctgatacctaacctctgcttggtccagggaagtgtctttcacactgcagttaattttgccctgatggcctggagtctggtggggcctcatgtggctcccactccagagcactcaatgacccagggaactctggatcgtggcttctgaggaggcccttgggtctggctcctgtcctttctccaacaccagctctccctctacgggcgggtggtgtgtcgagccctgtctgggtattggataggcacactcacatccctgtgttccccacaccttttgctctgcaatccctccctctggcctgcgttccctcgctcctactcctctttctttcctcccctcccttctcttttttcctcgaggccgctgcttctctggtttccttgccaggtactctctgcacctccttcttgctcaccccacctcattcttgctcaccccacctcattctggctcaccccacctcgttctggctcatcccacctcactctctggagctcaagtaggtgccttttcctcaggaaagcccctctggtcctccaggtctgggtttggggccttctcagccattcccactcttcccctcccttcccaccctcatctcttgctacactgtatcccatatgcctggttcacctgtcttccccatggccacactcctggaggggctcctcagactctggggtgcaccagagctattttggagcagctaaatgtagacaccagggcctgccccttgagattccgatgtcagggtccctctgaatccttgtaggtgagggacattgtgtcactcacctgtgtcttcctgttggccaacctggtacctaacacagtgccagactaagtggggcgttctgggtggcaggctgccccattggctggcatctcctctcgactcctctgttgaatgtgtctgtctctaactgcaccccctttccccgaggataggaacactgacaggccggatgcctctgctgtttacctgcatgacttccagaggtttctcatacatgaacagcaggtgagagcacaaggtgtgtgggtgcctgagggagctggcgggatgctgctggggactagtctcacccttctgccgcctgtgctcacctggtcacctgtgctcacctggccacctgtgctcacctggccacctgtcttcatggaacgattgcagtctgccagatgccagagacttcagattgctgtctgatgccactgaaactctggatgagaagagcctcatgtcgggcctcttttcaaggcacacattgaggatgagaagactgagaagatggcagggcaggaggggtgagggcctgaggatggggctgccctcacctggctgggtgcaccttttctggccatcatctcaggtgtcactgcctgggaagccttccttgactgatgggaggatgggatcagattcatcaagcctgccaggtcccctgggagataaactagcacagctttccttaaacaggtgatgcctgggacagtctccctggacagggtttgcctgtgggctctgagcccagctatagactcaagggggggttgtgttgcgccttggttttccactgctgtgacgatgcccccagaggacactgggcagtgtccagagacgacatgggtgcgtgtcacagcgggaggctgctgccggcatctagcaggtcaacaccagggatgttcctaaatatcctacattgcacagggcagccccccctaccccccagcgaagaagtattcagggccgggtagggtggctcacgcctataatcccagcactttgggaggccgaggcgggcggatcacttgaagccaggagttcgagacctacctggccaacatggtgaaaccccatctctactaaaaatacaaaaattaggcaggcattgtggtgggtgcctgtaatcccagctacctgggaggctgaggcaggagaatggcttgaacctgggaggtagaggttgcagtgagccgagattgcgccactggactgcagcctgggcaacagagcaagactccgtctcagaaaacaaaaaacaaaaacacccccaccccaccaaaaaaaaaaaagtcaaagaagtattcagcaccaagtacctacagtgctgaggacaagaaactctgtgagagtgagatcaacttgaaatcatcttaccagctgcacagccaccgacaggtggtttaccctttttgtgccccagtttccccctctttaagtgggattgagagcatctacctctgagaattgtggggatcagagtcaattgtatggatctgtgtgtgtgtgtgtgtgtacatgtatgcatgtcttttcacatataaatctcaaatttttgtttatatcattggagttccatttacttttttcttttacttcatttgtttttttttaaatagagtttatattttagagtagttttagggttgcagcaaaaataagttcatttacttaaaaaacctcttgtcttgcagaacatttcaaacatacacaaaagcagacagacggtttaatgaaccaccacgtatcatcactcagattaaaaattacgagcattttgcaattttttttttgtttgagataaggtctcactcacccccttgcccaggctggagagcagtggcatggtaacagctcactgcagcctcgacctcctgggctcaaccgatcctcctgcctcagcctcccgaatagctgggactacaggtatgtgccaccatgcctgacaattttttttttttttttgagatagagtcttgctctgtcaccaggctggagtacaatggctctgtcccatgttcaagtgattctcctgcctcagcctcccaagtagctgggattgcaggcgtctgccacaacacctgtatttttgtatttttaatagagtcggggtttcacaatgttggtcagcctggtcttgaactcctggcctcaggtgatccacccgccttggcctcccaaagtgctgggattacaggtgtgagccaccacgcccagccccgactaatttttgtatctttagtagaaacaggatttccccatgttgctcaggctgatctccaactcctgggctcaagtgactcacctgtctcagctccccaaattgctgggattacagatgtgaggcactgtgcccggcccactttgccagttttatttcatccacttctaactttacactcctgtatctccctacccttcccctttcttcatttctttgctgaagaattctaaagcaaaccccagactttgcgtcattttgtttgtaaatacttctgtatgtttctctcacagatagaacttttttttttaaaatatagccataacactcctcttacagcttgtgcaattaacagtaatttttaaatgccatccgatacccagcctgcatttggatttcattgatggaagagaaacttatgagtagagaagacatgttttgcacaaggccatccacactgagggctcaggaaagggtcgtagctaccctagtaggctgataaatggtgaatgaggatgttgatgcgtgttgtaatcatcatgccttcctagtgccggggttgaatgatgatgatcaaaagaaggcttatttgcccaacctgagactaagtttgagggaggaagtaaaatgaaggtaataagttaattttattgggcacagtcacgttaggtctgagctggtgctagagtgaggtagagagaaattcatgcacttttttcccttcattattttccttccactaaattattcagtttagtagggaacgattaaagttaaattggttaaattcttggggacaagtagcctcgcatcctagaattcaccacctggtagggagactggggcgtgtagatttaccccacctagtggtggttgactttattacgtgctttccccaaacggggccctttgctgggctgcccttagagatcagggatctggggccaggagaaagtgtaggaaatctctctctctgcatctggggagttaggacccgagcagccatgagcatccatgcgatgtttgttggtcacacagatgctcatatggaataatcactgcagcactttgtgtgcaaattagtatgccttttctagaaaacactttggctgtatgcaatgaaaagaaagctttacaactcgattctatatctggagtaaatagttgccctcccagacacttatcctaaggaaataatggcagcatttttaataggaatgaaaacttggaagtaatctaaatttctttagaggattggttaagtacgccatagtacagctctgggatggatgggtgatgggataggaagggggttaaaagtatgtttctagaatcagtgtttctgggtttagtctgaggctcatgactgggaccacttacttaatgactagaagcctctcctctgtttccccatttatataacatggagaataacctgtacctcctggggtggtggtaagttcaagatgagacaccgtgtggggccgagtatagagtcagtgctcagtgttgatggccatcgccatttatttttattttcatccttattctttgccattttcactattacaggtatctagtgcaataccctacaccaagtggatgcattttataacccctagaatattgacatttcagtcttctttaggtagaagatttctttctttgcagccagtccagggccaggttatattagctaagtacccatgccttttgataaatgcaaaaactttgtagggggaaggaaggagaatgcctccagcctctttgggacatcttggccaggcaaagttgttttttttttttttcttttgagatggagtctcgctctgtcacacaggctggagtacagtggcgcgatctctgctcaccgcaaactctgtctcctgggttcacgccattctcctgcctcagcctcccgagtacctgggactacaggcacccgccaccacgcccagctaattttttgtgtttttagtagagacggggtttcaccgtgttagccaggatggtctcgatctcctgacctcatgatccgcccacctcggcctcccaaagtgctaggattacaggcatgagccaccacgcccggcctagtattttaataaaatatcccacaatttgggtttcatgttctagtattcaaagattctgacacctctgtattcaaatgagcttgtagtttcccaccttcctagctgttttgggcccctgatccaggcatatttgcaagagtcaacagcagttcatttttgtcttgcacccatgcatgtcaccagcctgctggtcaccacctgatttgtgtctgttcttctatttttcattgtttcggacattgcatccagcccttcccatctaagcacacacacatctggtcgcatatttgcttctattagtcataaagataaagttgttagaatatttgaagtgaagaaagcattgatcaaagttgaatttacatgtcatatttcatccccttttcctatgaatatttgggatttcagggcatggagaggaaagcaacagttacttaatattatgcattctttttttaaagggtttctagaatgtctaggactgtgcagcagctgctttggaactggtcatgtatatttcagacgttatcagtgtttcagcagccctgtttgcctattcttttgaaaagagggcatatgattacattccatatcagtttcgttatttggagctgagactgcagtttacaagctgtgtgagcttaggatcatgaggtattgttcctgggcctctgtttccttttctgtaaaatgacaatggcaataaatgacttgcggagttgtgtggactaagtgagatgaccataggaggaagaaagatgcttgtttgcacaagctgccacggtcagagtactttctttttttttgagacagagtttcactctgttgtccaggctggagtgcaatggtacaacctcggttcattgcaacctccgcctcttgggttcaagcaattctcttgcctcagcctcctgagtagctgggattacaggcacctgccaccacgccaagctgatttaaagaaaaaaaaaatgtttgtattttagtagagatggggtttcaccatgttggccaggctggtctcaaactcctgagctcaggcagtccacccgcctcggcctaccaaagtgggtctgagcactttctgtgcaccaggtgctgcattaggcacataacctaataagattttatacaatgcttcatacagtgtacatttcatacaatgcttcacagaaactgtgtggtagatactcttattcccacttcatggatggggaggcacagagacggtatgtaacttgcccaaggtcaactaggtggaatgagatgccaacccaggtaagtgacctggaaggctgatgtaactactatgcccccaggctgcttcatactaacaaacgtaaagagctatcatagggcaggagctggcaaaccatgacctatggaccaaatatagctgaccacttgtttttataaacaaaatattgttggaatacaaccatgcccatttgcctacggatcatctgtggctgcttttgcaacacaacagcggagttgagtggttgcgacagacaccgtatggctcagagagcccaaaatatttacctctggctctctgcagagaacatttgctgacccctggcagagggccatgtgcagaatgaggcctcaacatgtggtggtcgattgcaagtgaattcggaattggttgatgtttcagtcttcgattgcgactggatggaccctgggaaatgaagaattttatcagttctcactttgctgatctctcgttctctttgtcattttaaggagcattgggctcaggatctgaacaaagtccgtgagcggatgacaaagttcattgatgacaccatgcgtgaaactgctgagcctttcttgtttgtggatgaggtgagtaggctgggcttgttgtcgcttgggggtgactttttgattgatgtctgtgctttctgaggtttattttctgtttgtctttccttggagaactttgctgtatgatgttgcctcgactgactggttagctgggattgtttcttttcttttcttttcttttttctcccaggttctagattactgtaactgtaactgcccagtgggttcattttgcctgctgcctagacagaaccgattgatcaaggcaggggaattgcaatagggaaagagcttaactcacttagagccagctgaatgggagactggagttttattattactcaaatcatcctccctttcagaggctggagtttcgtttttttatgtttttgtttgtttgcttgtgtgtttgtttttgagatggagtctcagtctgtcacccagcctggagtgcagtggtgggatctcacctcactgcaacctccgcctcccaggttcaagtgattctcgtgcctcagcctcccgagtagctgggattataggcgctgtccaccatgtctggctaattttttttgtatttttagtagacagggtttcactatgttggccaggctggtgtcgacttcctgacccttgtgatcagcccgcctcagcttcccaaagtactgggattataggtgtgagccaccgcacctggcggaggctagggtttttttttaaagattgtttggcgggccagggaaagggtgctgctgattggttggagatgcaatcatatggttgtggaaaatagtgtgcttctgggtggggccacaggaccagtgggcggtccaggtagagccatgcgaacgcccgaaaagacgtctcaaaaggccaatcttaggttaaaccacagtgatgttatctgtaggagtaactgaggaagttgctaatcttgtaacctccagaaaaatggctggtaaccagttagtctccaccttagcagaatccaggctcctctcatcctcctaacctggtcttaccttagctttacaaaggcagtttattttgggggaagggctggtatttaaactataaactaaatgttttccaaagttagcttggcccaagaccaggaataattaagggcagtttggaggttaaaggcaagatagaggttggttagatcagatctgtttcactgtcataattttcttgttgttctgattttggaaaggcagtttcatagccctttcttactcttctctactgactgtgttgcctgggtgggattattgattttgccactagagggcatctgccaccagggagagttgaaccattgcaagcacagaaacagaatgcgaaggtgtctgggtgcttgctggtcagaatggttgcctttgaccttgcatagggaaggaggggaggtggaactggggagcgactgacccatatgaggtcgttctcacgcagcagaaattaggcccagatcgctaaagcatttttttttaaggggccaggaattgtaacttgaaatttcctgccctttcaacattctgatatggataacactctgtttcttaagttgggtcgtgggttcacaaatattcatgctactattatgctttaaattgtatatatgaggccgggtgcagtggctcacgcctgtaatcccagcactttgggaggctgaggcgggtggatcgcttgaggttaggagtttgagaccagcctggccgacatggtaaaattctgtctctactaaaaatacaaaaattagcctggtgtggtggtgcacgcctgttatcctagctgcttgggaggttgaggcaggagaatcgcttcaacccaggaggtggaggttgcagtgagctgaaattgtgccactgcactccagcctgggcaacagagcatgactcagtgtgaaaaaacaaagaaagaaaaaccaacaacaatgtatatatggtaagcataaacccttgcagtagcaaatattttaggataaacattacaaaggaaaatattgtctaggtccatggaacaaatatgtcgctgcagcccattgcagcctgagccttcggtattgaaaacgtgggtaactgaggtctggagaccgcctgttgatttcccgcatcagagctgttcttcccccctggtgggcgcagaccagaaacaagcagacaccatcctgcccgtcaacgtgatgattcggtcttcgtgtttgactcttttagttcctcacgtacctgttttcacgagaaaacagcatctgggatgagaagtatgacgcggtggacatgcaggacatgaacaaccccctgtctcattactggatctcctcgtcacataacacgtgagtttcagatgagcctgtgatgggttgggcagcacagagcacgtgagggttgaggcaggggtccgatacgccgctccggtgagccctgttgtgaagcaggtggagggtgtagcaccgcattccttggactaaaatacacagaagcttctggaaggggctgggaacacacttccctttgtcagctggcattgtaataataatctcttttctgtggccctaaaaagctagtaaaaacaaaggtaacttagtttatgtaacttagtaactaaagtaacatagtaaacttagtttttcacgatttgggcatctcacagtagccacagcaaagcaattcagtgactcattgaattgacttatagggagtgtgtaccctgtgcctgctgggagctggggatgtggctgtgaaccggcagcagccatgtcctcatgtgctgggaggaagacctccattgaaagttaaccacagaataggacttgctgatgtggggagcaggtggtaaggcaaggagaagtgtttcagacagaggagcagcatgtgccaaggccctggggcaggaacaactgagaggagtctgctaaggctggagtgcagaatccaggagagcggtgtcaggaggggaggaaggcaggtcctgctggagcaggatcttgtaggtcaccgtgagagctgtcggggagaccctgacgacttttaaccagaagatgagatgctcacagggggctcttgggatggttactctgattgcaacagaaggaggatacaggatgttgcgctgatgttccagtatttagtctgtcttattgggtgaggggtgaagtccttgggtgatggcccccacagctgtgggtggggactttcctaagtgacattccagggggtcatctgggaaaaggctttttatggtgttatgctccaggcatttgggaaggtaaaatgtctttcagggggaaattgatttcacagttctctcttccccaccatgcccatcattttaagagtttgtgtttcagcatggtgaattctagaaaacctagaagacagttaagaaatacaaacttaaaaaaaaaacttttattttcagttcagaggtacatgtgcaggtttgttaaacgggtcaacttgtgtcatggaggtttgctgtgcagattattttgtcacccaggcattaagcctacttactacccattagttatttttcctgatcctgtccctcctaccaccctctgacagaacctagtgtgaggaacataaactttttttttttttttttgagacagagtctcactctgttgcccaggctggagtgcattggtgcgatctcagctcacaacctccgctttcccggttcaacagattctcctgcctcagcctcccgagtagctgggactccgggcacgagccaccatgcccagttttgttttgttttgttttgtttttgtatttttagtagagacagaatttcactatgttggccaggctggtcttgaacacctgacctcgtgatctgcccgcctcagcctgccaaagtgctgggattacaggcatgagccatcgtgcttggcctcggaacacaaattttcaaaaagttggggtgaatcatgacaaggaggaaagtgcattaaagagtcattcttacggcagttttggtggatatggctcctagcatagccgattgcaccaacagttgttgaatatctgttctgtgcctggcctcaagccttgatatcaaaagaagtgcccatctttgtttagaccgaggacccagagagcggccatggggccttgttaattcatcttctgcagctttttttgcttctgacgtgctttgaccaacttctcctcaaaagaacacgtcctctccacgcttgcattgcccaggtggtcagcagtcacttcctgcgattgtggcctgacttcagagctcatgcccagtgtgaccgtgggattgtgtatttctgtcctaggccttagctttgagtctttctacatggaagaactcagagctttggcggctcgggcggagaagttcccccacaacaccctgaggtgcaggcttgccccccaacccctgtggctgccactctcacacggccacctgccttctctcctgcaggtaccttacaggtgaccagctgcggagcgagtcgtccccagaagcttacatccgctgcctgcgcatgggctgtcgctgcattgaacgtgagtagctccttcttggtggaggtcaggctcgcagcaaattgaggataaccatgtggttgctccatgttttctttcgaattgtaaaaaggttttaatggacacataataactgtgcatatttatggagttagagtgtgatgtttctttgttttcttttttctttctttttttttttttttttgagacggagtccctgtcatctgtatctcctcagcttcctcctgggctggtattagaggaaggcaaacagacacccgctgtgttttggcagctgggtcctaggtgtgcacaggtaccgcgtatcacctggattggggggtctgtgagcaaatgtgaaaagaatggtcagggctggatatggtggctcatgcctgtaatcccagcacttcgggaggctgaagtgggaggattgtatgaggccaagagtttgagaccagcctgggcgacatggtgagatcgtatcattacgaaaagtaaaaaaattagctgtgtgtagtggcatgcgcctgtggtcccaacaacttgggaggctgaggtgggaggatcgcttgagcccaggaggttgaggctgtggtgagctgtgattgtgccactgcactctagcctgggcaacagagcgagactctgtgtctaaactgaaaagaaaagaagggtcaggtggcatctctgcctgggcagatggcagacgccttatttccctccttccttctcatagcctctctggctattttccttccggcctctctctcaccaaaggctcatgggtgcatttggctgagaaaaggcaacaaccagcttgtcgtggtgtctcatgcctgtaatcccagcactgtgagaggtcgaggcgggcggatcacttgagatcaggagcttgagatcagtctggccaacatggcgaaaccctttctctactaaaaatacagaaattagccaggcgtggtggtgcacatctgtaatcccagctgcttgggaggccgaggcacaggaatcacttgagcctgggaggcagaggttgcagtaagctgagatcgcgccgctgcacgccagcctgggcaacagagggagactttgtctcaaaaaaataaaaataaaaaataaataaataaaataaaaaaggcatcaactactgacttaggctccagtgttaccaaaacgactcatcatggaagcaacgttttgtagcagttactctatagactttcttcccgtttatgatttttctcctccctcaggaaaaaacaaatgtttaaaagtaaagcttgaagcagtcagctcctgtgccctccaggggtccaaaagattggggatgttcatcttccacatgacccatttctgtttgaaaatattactgtgaacctttacaaataaatttctcattgctctgtatcatttccacgggcagaaaaggcagtcaaggttttcaacaggtaaagtcagaaaataaaacacgtggtaaaatcttctttaaaaagaagcattgaggttgggcgtggtggctcacgcctgtaatctcagcactttgggaagctgaggtggatggatcatgaggtcaggagattgagaccaccctggccaacatggtgcaaccctgtctctactaaaatacaaaaaaattagccgagcgtgatggtacgcgcctgtagtcccagttactcaggaggctgaggcaggggaattgcttcaacccgggaggcggagattgcaatgggccgagattgtgccactgcactccagcctgggcaacagagcgagactttgtcttaaaaaaaaaaaaaatgaaaaaaaaagcagcattgaaactagcttgtcttggacagctgcacttgcattatgtaagcgcacagggaaccctgcggatacagggaaagccatgtcctcgtgttggcagccgaatggagggagtgtgggtgtccttgtctagtaactgaactggtgtgtgggccgggggctgacctcggggctgtcagtgaacacacgtggtattgaggctgccgcgtttctccctgtagtggactgctgggacgggcccgatgggaagccggtcatctaccatggctggacgcggactaccaagatcaagtttgacgacgtcgtgcaggccatcaaagaccacgcctttgttacctcgaggtcagttggctgatttctgggtggtgtgacttaaaggggaaggcagctagggttggatagacagatggacagacaggcaaacacacacagacacctccctccaaatgcgggaaggcctgggccccatcttggccaaagccactgccatcaagttctcacccgagtgttggcaccccctgcaggccgagagtgcaagttgctcccgggctctagagccccgaggaggctctggctggggaaccctgtggctgctcagtgcccaccccacctcctcattctgtctggcccccactttcagaacccccgaaagagagggaaaggctgggcgcagtggctcacgcctgtaatcccggcactttgggaggctgaggtgtgatcactgaggtcaggagttcgagaagagcctgggcaacatggtgaaaccccttctctaccaaaacacacacacacacacacacacacacacacacacacacacacacacaaatcatctgggtgtagtggcatgtgcctgtggtcccagttacttgggaagctgaggtgagaggattgcttgaacctggcaggcagaggttacagtgaggtcacattgcgccactgcactgcagcctgggcaacagagcgagaccctgtctcaaaggaaaaaaacccaaaaaaacaaaaaccaaaaaaaaagtgaggcaaggaaagtaaaattccccttctgtcctaattccctcttttgtgcccagttctcacccccaccaaacctgtttctacaggcggaatccaagcagccagtaatggtggtggtgtgttttttgaatacccacctggggccaggctctgtgctaggttctttgtacaggtgatcatattgattctttgccacaaagtgagtatggtcatccccatttaacagatgagtaaattgagacaaggaggggttaaatgggtgagaacatttaggttcatttcaagggtttctgacctcaggtgtaatcctcttctgtcccaccagaagatcttggtctgggctggaggtcaacgaaattgttctataaagagccagatacaaatgtttcaggctttatgggccctgtggtctctgttgcaactattcatccctgttgctgaagtgcaaagcagccatgggcaagaggtaaacacatgagtctggctgtgttccagttaaaacttgaattacacattacaaaaatagatggcaggccagatttggggcagaggccatcatatgccgactcctggtttgggttccttgttatttctgagagctggcaagaggccttctataggctcattggaatgatagttgtctttttatactttctggggtagaatagcagttacgagtatgggttctgagtccttctcgctgagtttgaatccagctgttgagtactagtttgggcaaagcacttaccatcctatgcttcaatttccatgttaaaaaatagaggtgataactgtgtgcacctcacagggcggttgtgatgattaaatgagatgccattacagcaagtgcttaaccctgcacctggcatagagtaactgttgagtcaataagatcgattattttttctctttttttcttttcttttcttttctttttttttttttttgagatggagtctccctctgtcgcccaggctagagtgcaatggcaggatctcggctcactgcaacctccacctcctgagttcgagcaattcccctgtctcagcctcccgagtagctgggattataggcatccaccatcatgcccggctaatttgtgtattttggtagagatagggtttcactatgttggccaggttggtcttgaactcatgacctcaggtgatcctcccgcctcaacctcccaaagtgtggggattatgggcatgagccaccgtgcccaacccgattggttatttttattgcatttactgcagatgtcccttgagctgggtggaggtgttgctgtgagacaatgaaattatggacgtcttttcgcacttggtgaaaacctttcaatgaaggcatatgatttctccatcgcagcattctcccctgtggggtcctagcccttctaagtgccaacctccatcaggcagatggaaggagctggtattaacagacactgtgcagtggcagcttacactctgctttgagagtttgctttcatttgcaggacataggtgcttatggttgtgagctgacagtcattcatcgaacattatctcattcatgactagaggaagttttttctggttaaaatagggctggaatcatctaacacctatagggctagaactctgtaatcaaacattaatgcattaatgttttggcagcaaaagccatccttattggtattaagagggatttaagaaaatgattgcaagcagcgttcattcgaatggttcagattttgctctcagttacattttgataccaacttactaggtagcctttgttgtaaaagctttttagctgttatgttctagtaagggtgtgtggatcaggatcggggagtgagctgggtccacgcttcccaggagtgatgaggctatgatttacttgagctggaacatggttaaggattttatttttatcatcgtcactttattttcacatttaccttcatttctattgagtgacgtgatttcctatttatggaagtgacatagctgcctttagaataattttgtttcatagtaaatgccatgcacaagcctcagatggattcttggtgggaaaaactccatctatacagtatatttcttggataactggggaaatttgagtatgtctaatgatcagtatgtctaatgatcattatttaaagatagtttcctgaggtgatatggtgtggtgatgtcaggggatgttcttaagagatacctgtgggggatgtctgcgccttatttcagatggttcaggaggaaacgtaaatatgtgtataaatgaaatacaaatataggctgggcacagtggctcacgcctgtaatcccagcactttcggaggctgaggcgggtggatcaactgaattcaggagtttgagaccagcagcctggccaacatggtgaaaccctatctttagtaaaaatacaaaaaattaactgggcatgctggcagatacctgtaatctcagctactcaggaggctgaggcaggagaattgcttgaacttgggaggcggaggttgcaatgagctgaggtcacgccattgcactccatcccgggcaatgagtgaaactccatttccaaaagaaaaataaataaataaaataaaataaataaatacataaataaatgacttttctcctgcctcaggaggagtatgtgtgtatatatatatatatatatacacacacacacacataaatatatatgtgtgtatatatacgtatatatgtatatacatgtactaatgatatgtgaatttatacatacacgttcacatgatatagaaggatacaggtgatccttattggtggattctacttgctaaaattgacttgtaaccccaaatcaaatctcaaagcactctgaggtcattctgagacacgcacaaagtgtgggaaatgagactcatgcgatgcacacgtgttcagctgagggtgagcaaagcagcgctccccttcctggtctacagcgtgaaagcttcaacaagtgtcctcaccatctgttgactgccatgtttttcctgtttttgagctttttcttggtgatcttgctgttcaaatggcccgaagcacagtggtgagggctgcctggtgttcctgagcaggagaaggctgtgatgtgcccgatggagaaaacacctgtgtcagatacgcttggttcaggcacgaattacagtgatgctggctgtgagcccagtgtcagtcaataatatataccaaatcaggtgtctttaaacagaaacacacataaaacaacgtcagatattgattcattgaggaaaatgttgtgaccacacgctcaaaaggccctgatcctgtatttccccttaggagcaatggctcaggtatttgccaatcagtgttggtggtgactttatgaaccataaccccaatagataagaaaaatcaactacagatacacacaaatgatctataaatacacagacaccttatagaaatatacatatatacacatacaaataataaatgtatgcatgcacacatatgcaaattacatatgtgtgcatatgaatgagaatatataaaaccaatatactttataaatagaggaagtaataaacatactaaagtaggtggatgcacacgtggaacagcgtccctgttggtgaccctgggtgaagcacacatgggtgcttattgtgctgtctgttcatcttttctgtaggtttgaacttgaaaaaaagattagagacttttttctgtaagtttaaagatatgaatagatggaaaaaaatacagagaaaaggtgcattctggggtatggggaagctcctgaatcagatcgcagctgttctgagtcccaagacttgtgccttcacacccaggatgaggtcctctccttctgggagggcagatgtgggggttgtgccccccgagcagcgcccggtttctgtcgtcccagggagctgccctggcccctctgtggggcagatgcagaggtgtgtgctccccctgccgagctgcccaccctcttctgcctgcagcttcccagtgatcctgtccatcgaggagcactgcagcgtggagcaacagcgtcacatggccaaggccttcaaggaagtatttggcgacctgctgttgacgaagcccacggaggccagtgctgaccagctgccctcgcccagccagctgcgggagaagatcatcatcaaggtaggcaccccgggtgctgctgttggctgtccagggagcccagtggctcggttccccggctctgggtcccgttcaccaagttctatgtcctactgggcctgctccaggtcccactgcacaggctcaaatctgctctccttactaacactgtgaccttaggcaaagtcattaacctttgggagcctctgttgtcaccagtctctgggggagataatactggaacccatctggctagcttgctgggagcatgatgtgagggaaggcgtgcagaatgcgtgcaactgcgcctgtcatgtggttggtgctacgttaagtgctaacctgttatagttcatttgttcattggtgaaccttccccatcctctctcggagacagccccatgcgaggtgctggaggtgtccagcgacctgggtgctgttcctgtgattgcagcttccagttgtgtgggaggcgggcagttgctagaaaaggctgagtgcagcaatagagctgatgttcccagcactgcaggggagatgggtgattatatctgtgcctagggatgccatggtaacatttggatttttgaattattaggataaagagaccatatatgccgtggcttaaagcacagaagagtttatttcttccccatgcgagggagaatgttctgtgagttttgagctctagcccacaaggtgactcagggacccggggcccccgcattctgctctagcatctctcagggcagcagttttcaactggggtttcacagacccccgaagaatccacggttagaatcagaggggcacgtgaacttcaacagaaaaaaaattacatctttatttgtttaacctgtacataaaacttaatacttccttccattgtgaacattggcagcaagccacttgcgggctctgtcaccagcagaagtcatgagtgttttcatatcccgtttacagttattgcaaatatttcaaaataatgttgtgctcgtcatcactttggaattatggaggttattaggtctgcctctagatcttatttaagatgttaatgaagaaacccatcttttagtgtattgcaaatatttatttaatatcttaatcatgtttcaatataattgagtttcctttgtaattttatgcattattattctgagaaaagggtctgtagctttccccagattttgaaggagctcattacacaaaaacggtgaagggactttgctttgtccttgtttatgtggtggacgcttggtctcaggcacatccgagttccagctcagagcacgggaagtccaagggtgtccagggcaaatggtttctggtaagcaagtcagctgtcccgtccttttctctactgttctgtgcatgagagcttagtcacgttacctgcaaggactgtggaatctgaagtccctagcggggcagcctttcatggaaggagcgagtgtgaattttgttgacattccacaagctcatggggaaggacaaacagctgtttcctaggtatttcagtctgttcctgcagctatcacaaaataccctaagctgggtgggttataaacaacaggaactgatttctcacggttctggaggctggaagttcaaggtcagggtgctggtatgagagtcctcttccaagttgtaggctgccgacttctagttatgtcctcacatggtggaaagggtgaggcagctctctgggacctcttttatttttaaatatttatttatttataaataaccatctgggacatggagatatctttggcctcttttataagggcaccattcccattgatgagagctctaccctcattcccattcacgggagctctactctcattcccacttatgagagctctaccctcattcccattcataaaagctctaccctcattcccgttcatgaggactctaccctcatgacctaatcaccttctgtgttacccattctcacactgctcataaagacatacccaagactgggtaatttataaaggaaagaggtttaatggactcacagttccatatggctggggaggcctcacaatcatgtcagaaggcaaaggaggagcaaagtcacatcttacatggtggcaggcaagagagcttgttcagggaaactcccatttataaaaccagatctcatgagatgtgttcactatcacaagaacagcacgtgaaaggcccgcccccatgattcaattacctcccactgggttcctcctatgacacgtgggaattataggagctgcaattcaaggtgagatttgggtggggacacagccaaaccatattaccttccaaagctaccatctccaaataccattacattggggattaggtttcaacatataaattttgggaggacacagacattcagaccatagcagtaggcagagaaaggggatgtccttccaggttgggacaataggacacacaagggtgtggtggtgtcaacacgtggcatgtaccctatattatcactgggccaccaagatacattggacacaatccttatgttccaggaagtcgtggtttggtagggagacaaacccgtcaacagagaaacaccaaacagtgcaaggagctttggccaagcgcaaccagaggaggggatgttggtgcccccatgggtaagagcatcagtgcacggggagtgtttggccaagactgtgacccttaaggtacagatgtttgcctaagcgggagatcagctgtcattgtcttagtcttgcagatgagaagtgtgaggcctggagaagtgcagccacctggctggggtcacaagttaacaaaatagctgcagcactgtttgcacccaggcagttgtttcggagatgccaagggatgcttccagcacggtgaaggcaggataaggggtggagggagctcggccatggagggtccatggcttctcaggcacctagttggtgagtcttcggggcagcctggttgcatgtgctcttccctgttcccagctcattccttctgtttccattaggatggcttgctgcctgttcccagggagttttcagctcttgttctaagatgcaaagtactgaaggccccttttagagcacactctgccccacacctgatacgctgtggcccacttctttctatttcaagaaatgaggtggaaatagcgttggccacacggtcactttgtaccatgcactgggctaggcatggtcatacgtatcttcttattcagtcttgtcaagacactgcaggacgaataacctcagcccttgcccactttacagatgtggacattgagattcagaggttaaatagctcagccagggtcacacatttagtatttgctgaggaaattgttcaaggccaaggtggtctgccctcagagcctgttttcccatgcctgtatcatgctgccattcacaagggacactgaggtcctgcttcactgttgacacttatctttcacgttctttgacttacgggatcccacaggggctgccacgtcccgattttacgagacagattactgagactctgatgatgactcagccaaggtcacatggccagtaaggtaataggccctgaattcaaatctggatctgactccccatcctgagctccttcaccaggttacatgaccctcaacttacagacgcttgcctgcgtgggagtccaggtgtcatcactgtcttaatcttgcagatgagaagcctgaggctcagagaagtgcagccacttgcccggggtcacacagctggtagaacagctgcagtgctgtttgcaccccggtcgccttagtctaatccccattgggtcccccgccaccctgcccagcctgttccctctggactgcggcctgcctttccctctgtgtgctagagaaggctgggcacaggtggtgttgttgtttattcaccgagtatcaacagagcacttactgtctgctaagtgctcttctagcacaggagactcaacaggaagcaaaacaacatccctgccctcatggggtttatattctagcagtgaggacagaagacaaacacatggtgtgtgtagggctagacaagtgagaggaataaagcaggcttggggctagagagtggcaggataggaaggggagtgtgggctatttttacttatttattttttactgggacagagtctcactctgttgcccaggctggagtgcagtggtgcagtctcagctcactgcaacctccacttcccaggttcaagcaatcttactgtctcagcctcctgagtagctgggattacaggcgcgtgccaccatgcccggctaatttttttatttttgtagttacagggttttgccatgttggccaggctggtctagaactccttagctcaagtgatctgtctgcttcagcctcccaaagtgctgggcttataggtgtgagccactgcgcccggccagtatgggcaatttttagatgaagctgtaaggaaagctcctcctcctcgttcagggtaacctggagggcagagctgaacagactaagagggaagccaggcagcaagaacaggcagtgcaaaggccctgcctgggaagaggcagatgaaggctgctggctcaaaggcctaaacttgggtctccatggagacagcctatgtatatgttttcccctcagcataagaagctgggcccccgaggcgatgtggatgtcaacatggaggacaagaaggacgaacacaagcaacagggggagctgtacatgtgggattccattgaccaggtgggccttggtcccttcccgtagccactgcggccaccccccttgcagctgcttcttggagccctgctgggagctctgagaatacgcctgtcttgttcccatttttagtcaagtgagtttttgctatgtgaatttaccttccttcttaaactttatttatttatgttgtgggacagggtctcactctgtcgcccaggctggagtgtagtggtgtgattgcggctcactgcagccttgacctcccaggctcaagtgatcctcccacctcaacctccctgagtctctgggaccgcacgtgcgcaccaccatgcctggctaattttttgtatttttgcagagatgggatttagtggcgttgcctagggtgatttcaaactcctgggctcaaacagtcctcccaccttggcctctcaaagtgctgagattataggcgtaagcttctaagcctggccaactttattttccttttgcatttttaatgttttattttgaaataattttagattaaatatatttacacacacaaatagtatgggatattcccatctacccttaccaagcttctccaaatattattaacatcctacataaccatagtataattagcgcaatcaggaaattaacattggtacaatactaataactagtttatagatggtatttcattgttgccactgtgttcactcaggctattttcctgtttcaggatccagtacccggtgctgccgtgcatttaggttgtcctgactccttcgtgtcctccaactgggggtcgttccaccagaaaccttatttttcagactttaatgctgcctctatccctttacctaatgtgtatatccattttgagtatatttttacatgtccgttcttatatcctagatacaacatacatatcaaaggcaatatttatttattacttatttatttattttagatagtcttgctccattgccctggctggagtgtggtggtacgatcttagctcaccacagactccacctcccggttgaagtgattcttgtgcctcatcttcccaagtaactgggaccacagatgtgcaccaccatgccctgctaatttttgtagccttagtagagatagtgtttcgccatgttggccaggctggtcttgaactcctgatctcaagtggtctgcccgccttggcctcccgaagtgctaggattactggcgtgggccactgtacccagccaaaaatggcaatatttaagtaaagaattaagttgggccaggcgcgatggctcatgcctataatcctagcaccttgggaggctgaggaaggcagattacgaggtcaggagatcgagaccatcctggctaacatggcgaatccccgtctctattaaaactacaaaaataagttgggcatggtggcacgtgcctgtagtcccagctactcaggaggctgaggcaggagaattacttgaacccgggaggcggaggtttcagtgagctgagattgagccactgcactccagcctggtgacagagacagactctgtctcaaaaaaaaaaaaaaaaaaacagtgcagcacaccaacatggcacatgtatacatatgtaagaaacctgcacggtgtacacatgtaccctagaacttaaagtataataaaaaaatacaaataaaaacgttattaaaaaaaagagtttctgcataccctgcacccagcctcctctcacattaacgtcatgcatgacaataaaacagtgaccaaagctaagaacttaacactggtactttacaataaaaccagagactaaatttcatcggggaaaaaaaaaaagaagtcattaagccacaaataaatattgaacgtaaggtctccagacaaactggctgggaaatcctgaaagttttaaaaggtagatggaatagaaaagaaaatgatgaggagttgtacctaccttagactcatggatctaaaaagtccaaaaagaagctcaaataccaaaagaagctcaaaatgcatcgatattttaaaaaagaaatgccttgtaaggaattgaattcagagaattcgccataaatgtctatgaaactgggaaaagcacatccatagtagatgctggggtgacgccctgcagggctcctgggctccacagttgatgaggtagaggacttggggggcactaataccagtttcactttctagaaatggactcggcactactgcgccattgctgatgccaagctgtccttcagtgatgacattgaacagactatggaggaggaagtgccccaggtagggggacaccctagccacatagggaggaggtccccaggaaccccgaggaccagccagtccccgggacctccttcccatgtggcttctctggccggctggcaaggggatgctccgctgaagaagctgttgatactctgggtaccatgtcctggctggcttgtctctgattggctggctgccccaggtgctttaaccagtgaggttcaagatgctttcctgctctctaaagtgcctgattggccttagatggaggccggtgctctggcttggtcccatgctttcctgttgccctctcctccagctgtggtcatctttcccgctgtttatttctgcagcccccagggcctcatggctctcagacttcccatagaacagaatggagggctttgctgggaaccgttcactgcatgtctcaggatgccaggaggccaccataaatgagggctctcaggagtgggaggcaggcagaggagggtagcaggtgctgttttcccataccccttcgggtggggaccagctgaggctggcctctctatgttatctggtaccctgggtcagggtgagacagaaggacctgtctagtgatgctggggtttggtccaaggctttcagaaacccctcctctctttgcggcccaggatataccccctacagaactacattttggggagaaatggttccacaagaaggtggagaagaggacgagtgccgagaagttgctgcaggaatactgcatggagacggggggcaaggatggcaccttcctggttcgggagagcgagaccttccccaatgactacaccctgtccttctggtaatgcccccgacccagggaacgcctaccttcttctccatgccaaccgatgaggcagggtggcgagtggttctagctcaggcaggaattgggcaggctgggacctgaatcccaggcttcatttgtctagctcttctaggccgggacaagggtgaggtgggtatgactcacttcggcactgtaacccagattaatgagatttcagggcaatcttttaaaaaatcaaaagtaatgcaaaaaagtctgtgatgaacaaaatatgaacattttaaacaaagacaagatctgaccctactcttagatgatgtggtctcactcactttccccgatcccagccctggagtgggtcatgtggctctggatgattcagccaaccttctagcatctctgtctcctccataaaacgaggactctagggctgtccttttgaagccgtcataggctgtgatgagcttgtgcattcattcatccacccacttatccatgtctcagtgcattaaaagatacttcttgagggcgtgccctgtgctagacacagtacttatgccagacagacaatgtctttgtcctcctggacactagcgtcttttgaaggagatgggcaatgaaaaagcagtcactcaaatgatttgcaagtatagttgtgatgagtgcaatgaaacaaggcaacataaagggacatccctccctttattgggggggtttaatgtgagttggggggatttgtgaaagtctgtgaggaaggctctgatgccctgacgtggggaatggttaggaaaaccttcctgaaagaagatgagacctgaaagagggaaattataattctgtcacttaaaaaaaaattgtgatagggtcttgctctgttgcctaggctgtagtacaatggagcagtctcagtcactgcagcctcaaactcctgggctcaagcaaccctcctatctcagccatttaagtagctgggactacaggcacatgccacgacacctgaataacttttaaattttttgtagagctggagtctcactacgttgcccaggctggttttgaactcagctcaagcaatcctctggcttcggcctcctgaagtgctaggattacagctgtaagccattgcacctggctgaaaattagaatactaataacacgcaaataatcctggacacctaaatgatgcttaccatgtgctgggcagtatttgagacaccttgtgtgtgtggtctcgtttactcttcaggatgcctctttgaggtggatactgttatcattcctgtcagaccgctggggtagtaatacagtgtggctcagacagcacgggtgacctgctccaggacacttggttcatatgtggcagagctgggatttgaatccaggcatcctggctctagagaagcagttatatatataaaagggggatggggtggggtggggggggggaagtaggtagaatgttctggaatccaggctgagggtctagcctatactaaggccctgcatctggttttgttgttgttgttgttgagatggagtctcgctctgtcgcccaggctggagtgcagtggcgtgatctcggctcactgcaaccttcgtctcccaggtacaagtgattctcttgcctcagcctcccaagtagctgggattacaggcatgcaccaccatgcccagctaatttttgtatttttagtagagacgagatttcactgtattggccaggctggtctggaactcctaatctcaggtgatccacccgtctcggcctcccaaagtgctgggattacaggcatgagccactgcgcccagcctcctgtgtctgttctaggagcagagggaaggttgtgtggccacatgtaatgtccccgcctctgaggccctggctgccgcaatggcctggcctgcgttctcccagcactgatggcgtcctctccccgcaggcggtcaggccgggtccagcactgccggatccgctccaccatggagggcgggaccctgaaatactacttgactgacaacctcaccttcagcagcatctatgccctcatccagcactaccgcgagacgcacctgcgctgcgccgagttcgagctgcggctcacggaccctgtgcccaaccccaacccccacgagtccaagccgtacgtgtctgagggtggagcaggaggcaggcggtggtcgggttagctccaccaggcagagaagctggcctggtggttcagccgggccagtcccccaggacaccctctccccagcccaccggcatctcaaaattgccgaggtggccagtttccaaattcctggcaccatgacctgtgtccttttctcttttctttctttcctccccttttctcttttccctttcttctactttgtcttcatagccccgagactttgggctttgattttcagagggtcattttggcctggggatattctcttacctttcagagctccttcctgtttgttctgaaaatgaacaaggaaacaatgattataagagtctcccgctgattttttttatctagtgaaatgagtatcaaggtaggtcttgcgaagggtcaacaaattctgggaataaagaaaaaacaatttttaggcagaaagctgcaaaaatgtacatttccgaggaggccgtattacttatagcaactttttttttcactttttctgtcacattttcctatggattgcctcttaaaacttgctatttcttatcttaagaaataacccgaaaacaacccaaaaccttgtgaaactcctgctgtgatctccgtcttcgattttctgagacacgtggcaataactgtgcctccctgggagcctggcttttcaggtttgggctgcttgggtggatgaagatgaatcaattttttgagacaaggtgttgctctgttgcccaggctggagtgcagtggaacaatcacgtctcgcagcagcctcgagctcctgggctcaagtgatcctcccacctcagcctcctatctgggactgcaggtgtgtgccactgtgcccagctaattaattaattaattaattaattttgagaccgggtctcgctctgtctcccaggctggagtgcaatggcacgatctcagctcactgcaacctctgcctcccaggttcaagagattcttgtgcctcagcctcctgagtagctggtattataggcgcacgccactgggcctggctaatttttgtatttcctttttttttttttttttttttttttgggacagagtcacattctgttgcctaggctagagtgcagtggcatgatctcggctcactgcaacctttgcctcctgggttcaagtgattctcctgcctcagcctcctgagtagctgggactacaggcgcctgccaccatgcctggctaattttttgtatttttagtagagacagggtttcaccgtgttagccaggatgatctcgatctcctgacctcatgatccacccgcctcaacctcccaaagtgctgggattacaggcgtgagccaccacgcctggcccaatttttgtatttttagtagagacagagtttcgccatgttggtcaggctggtcttgaactcctggcttctcgcgatccacctgccttggcctcccaaagtgctgggattacaggcgtgagccactgtgcccaggctattttattttttatagagatgggggtctcattgtgttggccaggctggtctcaaactcctgaccccaagtgatcctcctgcctcagcctcccaaagtgctgggatttcaggtgtgaaccactgtgctcggcccaatgtattattttgggcttgaaacagacccctggggtcttccactattcttttcacaaattctctttgctgaggtgcctttgtctggggaagcccactgtgtgatttccatggtcgtttccagggccaggttccaggtgtcactggtgccattatcttgtcctctgcgggtggcccactgacagcctggagaccgctcacctggtcgttttccctggccctgtgccgcaggtggtactatgacagcctgagccgcggagaggcagaggacatgctgatgaggattccccgggacggggccttcctgatccggaagcgagaggggagcgactcctatgccatcaccttcaggtgggtgcgagggtgggaggcacatgctctacagaggggcttggcaaggacagatgcggagagacaagggggaacttcaggtggaggctcacctgcagtgctctgcccccccagcatcagcgacaacaacaaccaccacagcaaaagcctctgcgagaatgtgcgctcctgcgtgccaggcacagtctgcgttctccagggcaggatgttctgtagtaactcactttggcttccagtaactctgtggggttgacatgaccatgatccgtgtttctcagaggaggaaactgaggcacagcaagattaagtaacttgctgaagcatgcagccactaagtggtggggctgggattcgagcccagacagcccaggcagcccaggcctgtgatgatatagatctggtttcctcccaactgcagctgctgcccaaccacctctaggcctgtggttctctaatgttaccccaaaacgccagattctcccacttccactaatgacaaggagccgaggagtgactcagactccgtgtagcctactgtccctccatctccccagccccagggtttccctgcatgttcttacggtggtaacagtctgctatatgttgagttcctaaccgtgttctagacactggactgccttcaaggcctcatctgattgaatcctttgctacagcctgtgagaggtaggtctagttattgcaagggaggaaacaggaccagagaggttaagtgacctgcctggagtcacacagcctcatagtcaactgagtttgaggttcagatgcaggcctgtccgtctccaaagcctaagctcttcactccagagtctctagacagaggcctgggggccaaatctccagccagaggcctgtgggcgtcttttgtacactgatgtgaaaaactgagaaatttcactgaaaaactcagattgcttcttgtgaaaaatgggaggcagtggatgctctgggcctgtgtttccacatgggcgcggtggtgctggctgcatggcagctactgtggggtgtgtggtttgcccctgtccactcctctccccattccctctgccctgatcccatcccctggtgaccctgccaggctgccccctgggcgtttggatttcccttcctccttgcctgcaccactatgcctgagccacctccctggggaccgtggtgacggtcattatcactatagtttactgaggacctactgtgtactggctccagccagagagcagcctcccaccagcatggcttttctgtactctctgttcccaagagggtgacctgggcttctcagcattggtgcctctgccctttgctctttcccctaagcctcttagtggtacctcctcagcctggatggggaggaggtgtgttcagtccgctgcacacggattgaaaacctgctgtgtgccaggccccaggtggggtgttggcactcccactgtgctgtcatcctgtgcaaatgatggcaactaaacccaactggctgaaactgaggtgcccaagcggtgagacagctctgacacaaccggatcggggcctcacctgatgatggtcaggatgccacctgtatgtgcatgctggcgttactctccatcagcttctgtctcaggtggctgtaccttgggctgccaggacagtgtccggcagaaaggatggccccctccctgagccaggtggcatgattctgacaggccatctggggatggggttggggtcacttcaatgggaccgcgtgaatgaagaggttgggtgggtcctcaggttgattgcctgacttacatacacgccccattcagtttgtgagcctgtcttccccatgagattggaggtgtcttgagaatggaagtttttattttttagaagttaatagatgtttggtgagcacctactgtgtgccgggccctgtgctgggctccagagatgcaggagtgataaaaacagcccagtccttgctctctcaggctaatggtctggcagggatgagagacatcgccttactccaagtgtttcttgcttttgacctgttcctgcttatgtaacattggctgggatgtagttggtggttggtgaatgctggctcagtgaatcaatcagcaaggatggccgctccccacctcaccccatggcccactgtcagggaagctcagtccacacagtgtttctcaaagagttggggtgtgaggactgatcctgttgtatttggatgttgaacttccctggtctctacccactgcatgtctgtctgggaccctaagtcattgtaacaatcaaaaataacatccctgccccaggacacacactttttcaaaccctctctggtcagggtatggggtgaagcgtcactgtccttcactgagaagcactgaggaggtttgagcacataaggaaatcagtgtagtattttgtgatgagtgctacaaagggattggtcaggcagggtggtggagggtgagtagctctccagggaaacggatggggaatttggaccaggcagtaggggaacacaggtctgcagcaacttctccttgccctctacatatttgtaaagtgcctctcctgtgccaggcactgttctgggctctggggatgtgtaatgaacttctggatagatttccccagtagaggagaaacacctgctttcaaatccacaaaggaagtgttgagttgttgcccggctgtgattggtggaaggcatctcttgggcagtgaagctgagacctcaggctgtggccgtggcatccacgctccaggaggatggaagatgcaactcgtattccagacctgttcccatctccccttctgattctcttttctcccagggaagttagttgtgggttgatttcatttatgttttccaaaccattcacttactgagtcctgcctgagtgccagacactgtgccgacagcttaccctgaataagctaatagacgatgatcctaatgctccccatgcgacgggttgtggatccccgatgctgtggatcgggaagctgaggcttaggggtcccctgtggaaggagccggaacctgaccttggctctgtacctcggcaccccagagcccccctgcctgccctgaggagctcttataaaaagttttaaaattaatttttaattacatgaatattgcaggaggatattctctctataaaaaattaagacattacagtgaaggctaaagccccctgtggtccttctaatctcagtagagaggtcctggtagaaagcacagttttctagctggtgtgtccatccagacatttaaaaaatatgtacatatttatacatgtctgtatctatggaaaatatatggtgccattttgtgtctgggtattttcattctatttttagaaaatacaaatgggaacattctgcagcttttctactcagcagtgtttcttttctttcctctgtttttttagaaggaataaatatttaataaaatatcactggaaataaaccactgaagcagaagtcttctagcattttgtttttacaggactttttgacgaaatcgcttaaagcaatatattttttttttcaaaagactggaaatccttttttaaaaaaagaaaaaaaacaacgttttttaaaaaaagaaaaaaataaatattttaaaacaaaaagtctctctatagtgcaaaaaatgccttttcttgatttttttccctgccatgcaaaattgttaaatgagcagtatgcccatagaaacgatgcctctagatgcttttcctaatttatttaattgacaaataaaagttgtttatatgtatcatgtacaacatggtgttttgaaatatgtatacatggtgaaatggctaaattgagataataacatatacacacacttaaccattttttttttgtgtgtggtgagacttaaagtctaccctcagcaattttcaagaatacaggacatattttttttttgaaatggagtcttgctctgttgcccagtctggagtgcaggggcgtgatcttggctcactgcaacctgcacctcctgggttcaagggagtctcctgcctcaggctcctgagtagctgggattacaggcatgcaccaccatgcctggctaagttttgtatttttggtaaaggtggggtttcaccatgttggccaggctggtatcgaactgctgacctctggtgatccaccctccttggcctcccaaagtgctgggattacaggtgtgagccaccacgcccggccaggactttgttattgactatagtccctatgctgtaccatagatctcttgcacttactcctcttgtctaactgaaattttgtatcctttgaccaacatatccccaacactccctacctccccctgccccggaccctggtaaccaccattctactctccacttccgtgagtttaaacctttttaggtttcacgtatgagatcctgtggtatttgtttttctgtgcctggtttatttcacacagcacaatgtcctccaggttcatccatgctgttgcaaatgacaggctttccttttttttttttttttaaagcaaatggtattccattatgtaaatgtaccacattttctttatccatttatctgttgatgggcaggctgattctacaccttggctatggtgaatggtgctatgaacatgggagtgcagctttctctttgacatattgatttcctttccttcagatatataccgagaagtgggattgctagatcccatggtgttctatttttaattttttgaggaacctctgtactgttttccatagtggctatgctaatttacagtcccacccaccaggtgcaggggtccccttttctccacatccccaccagcacttctcctttagctaatagccattctaacaggtgtgaggtgacatctcatagtggttttaatttgcatttatctgatgattagtgatgctgaacattttttacgtaactgttggccatttatgtatcttcctttgagaaatgtctattcagatcctttgtccattttttaaaattttttattttttgagatggagtcttgctctgttgcccaggctggagtgcagtggtgtgatctcagctcactgcaagctccgcctcctgggttcacgccattctcttgcctcagcctcccgagtagctgggactacaggcgcccgccactgcgcccagctaattttttgtatttttagtagagacggggtttcaccatgttggccaggctggtatcgaactcctgacctcaagtgatctgcctgccttggcctcccaaagtgctggaattacaggtgtgagccaccacgcccggcctttgtccatttttaaattgggtcatttattttcttactattgagctgtttgacttccttatatattttggatattgaccccttaccagatgttcagtttgcagatgtttttcccattctgtaggttgtttatttactctgttgattctttccttggctatgtagaagcctcttagtttgataaaatcccatttatccactttcacttttgttgcctgtgcttttggggtcatatctgaaaaataattgcccagaccaatgctacggaggttttcctctctgttttcttctagtagttttacagtttcaggtcttatgtttaagtctttaatccattttgagctgctttttttgtttatggtgtgagataatggtctagttttcttctttcgaaattgctattatttctatataggaatttatttcaaaattcttttaatttttttaaatctaggtttcccaaccctacttatttaacagactgtcctttccccctggtgtgttctagacatctttattgaagatcagttgactgtaaatgcatggatttatttcttggctatctattctgttccactggtctgtgtgtctgtttttatgccactgttgtgctatttttattactatagctttgtagtatattttgaagtaagatagtgtgctatctgcagctttgttatttttgctcaaaattgctttggctatttggggtagacatttttaaaaagaccctcttggctgtaaacttagggtcaaaaatatttttccagatgtttctgtcttgctgataaaagctaataaaaccaaggaggctcttctgttttggattttttctgcttcatgtttcaaacagatgaaggaatgaaagacttgtttctttttttttttaaaaaaagtcactgttttgctagttgagtcaccgaagacaagatttaataattttgaggtgggggggattggcaaacattttctgtgaaggaccacagagtgaatattttaggttttgcaggccatatggtctctgttgcagctacacaactctgctgttacagtgtgaaaacagtcccagacaatgtataaacaaatgaactgtagctgtgtttcaataaagctttatttataaaagcaggtggtgggacacatttggcctactcttgacctagttccctaggaagctcctaaagtcaagtcctgtagttggggaggagaggaagggtaagaggagctgttgagtcactcggccatatttcttctgagacacagattcttctagatctgttttgaaaatacccacatcattgttttcttattgtcttgtattccataggaggactataccctgtttatttacccacttctctaaggctggataactaggttgtatctaatcagtagggtttgtgtaaaaattgtttggccaccaggatcttggcatgtcaaccctgtgttcttcccgctccagggctaggggcaaggtaaagcattgtcgcatcaaccgggacggccggcactttgtgctggggacctccgcctattttgagagtctggtggagctcgtcagttactacgagaagcattcactctaccgaaagatgagactgcgctaccccgtgacccccgagctcctggagcgctacaatatggtaggtggtggactcccttgtgatttggtgggatttcttgtctgaggttgtaactcatctgttcatgaattcagcaaacctctgagtattcaccatgtatctgatactgctgtaggtcctggggatacaaattgagcacaacaaagaccctgccgttgtgctgcttatagtgtagtgttggggagatgcaacaaatgacatttaaaatatccatagcatgtgccagatggtgatgagtgctatggagaaaaacactgggcaggtggataagaggatacagagtgatggggaaggggttgaagttttcagagggtggtctaggaagatctcactgaaaaggaatgagccatgtgggtatgttctggaggaagagaggatagcatgcgcaaaggtcctgaggtagaagcctgcctggaggcaccaagaggaagtcagcatggccggaatcaagccagcccaggtgggggtagagctaaataaggatgagggttcacaggtgacttatcatgcaggggctcataggccattgtaaggccctggctttttctctgagtcattggagagttctgggtgcaggagagacctgatgtggttactttgtctccattcctaccacatagatcattaatttattgaagagagatttatggcatcccgatcatgtgccaaggactgttctagatactaggagtactgtggaacaaaatctgctttgggaaatttaggttctggagaggagagacagataatatacacaattaagatgttttcaggtagcatgaaatataataaagcaaagaaaacaggatagtgtgaaaaggggtggacactaccttaggctgtgggagtggagatcagagaaggccaccttaaaaggggagaaatgtgagccgaaacatggaagatagcagtgaatgggatctggggagaagtgaatgaaggggtgactctaggtacaggagtggccacatcacaagccctaaggtgacatgaggaacagaaagaagagttagagaggaacagagaggtggtgggggtggatcttgtcagtggtgtgctagtaaatgttcaaacagctctcagcggggtaggggaaggcactggtttgtagcatttgccagtttccatggtgtaaatacttccatggaggtcagtttcaagttgttgatgtgctgtcgttgaacctggaacgtggagtcaggaagtgatgtacacagtgggcttttgtgagccgggaggtcactccagcacaccatcgcatcttaggatttgtgcttttacaaaggaacgcagtgcctggcacgcagcaggccaggacagggcctctctgattttgggttagtttccaagtctggggaccttctttatagcttcttcctgtgtctactcatgggccaaaagaaaattctatgaggtttcaactcctctatcaaaggataggtaaccataaggaagcctagaacccttgttatatgtaagggctattccaggagcatggattattccatttctttctttgtttttttttccaggaaagagatataaactccctctacgacgtcagcagaatgtatgtggatcccagtgaaatcaatccgtccatggtacggtgccgaacctccaattcacatgattttggagtcacgaggctgatgtggattccatcttgttcccatggcagttataacagggcaagggaagactttggaaaacctggccaaaataatttttttttttttttgagaagaaaggatgattgataatatcaagcctagtttcagggaaaatgttaatagaattccatccaaatgcaacagtgttttgctaaaattctgaggtttgacgaaccacctttgggccaaatggcttctaatgaaaagtctttcaaatgtttttggctcgctgatagagcctgtggtgtttataaattccatttggttcactgacctccttgcagtgcaaatgctatctcatattcccaccctgactctgttgtgtaatttcatgcaggtagggatggattttactttcagccctcggctcctccttgccatgctttcatctcaaatttagtttgagccggcagaggaagaaccgcagcgaattttctgtttgggggccatgtggcacacaattagtgtacaacgctcacttaggaaggggccctgcttgtgggctctgttgaaatccagagatgactttctttttcaaaaatttataatccatggccaatgcagatctgtttcagaaagaaatgaaatcttgaaaagttgtgggcaaattgagctgtgtgtgaaatgcattaagagaccttagtagcaaaaacttttgttagtagtgaaggatgttttggcgatgagaacagtcacctctctaactgatgacttttccttcctgtggccttggagactggctggtccttatatccacccttgaagcaggatacgcaagtagaggctgctctgtttgcaggtgggggagagaaaggcaagggtactgcttagcctctggcctccagctgcagatccctgtggcagagctcctagaacccacattgcttcttatgaaacatcatgcactatggcactaactcacattgatggatccagttctgggctgagccacttaaaacagctggtcgatgtggggcaaattactttctctctctgcatctcagttttctcatctgcaaaatgggcatactcatataactacttacctgttatggttgcttaaggattaaaggagataccttaaggcttggaataatgctttagcgatactatagttagcacttaagaagtgcaagctgttgtcagttttatcattatacacatgatctcatttagtagtcttaacaaccctgtgaaatatataaaaatttaattcccatttcacagacgggggaactgaggatcagagagactcaaacttatatcattattcaagggcagagcaatgatttgaacctacatatctgactctgtagcctgtgttctgaggaaaaattttactgggttccctgtgaaattcctgttcccatttcctttgggtgggaggagaaggaagctgctcatttaaacaggtttgacaacgtcagagcttttcccactaacatttgcttgccgtgtgggtgttcatttatgcccgccaggcagaaagcatgaaagcaaattcattgaagaaaatttctaaccaaggaagttctatcttatttagttctgtgaacagagaccaccttttgatgaatttcatggaggagaagctcagttactcttgcaaaatgtcagggtcctgcaggagtgtagataggggactgctgacctacaaaaacagagcaatgaggccctcaggacaggcaggaagaatggggttgcccttgagcttctgggaggcttgctgagcaccggcactgtgatgacagtcttggcttaatctaaaaggcatgtcctttctttgttgaggaaattgagcaatattgtgtcactacaatatagggtcactcccaccctaaccctaagcctaaccctaaccccagcgctaaaccctagccccaaaccctaactcctaacccctaacccttaaccccaacccaggtacccttggctctgactaggccagttctccttcactccctggtggctttttggggccttggatcctttgcaatgccagtccctctccagcagatgactttgtaaccttggcctgaagcctcctgctccccaatgagaagaaccaaatggtacctgggaacgcagccgcctccctcccctcctgtccctggcctgaccttttccttcttgttttccctgaaagcctcagagaaccgtgaaagctctgtatgactacaaagccaagcgaagcgatgagctgagcttctgccgtggtgccctcatccacaatgtctccaaggagcccgggggctggtaaggctgagtggaggctgggctgctcggcaggtgggcttgacttgtcccttcttggtgataagactcaggtgctggccaagtctgaccccctttgtcatcctgggctggctttgacctcttgtgttaagtcccttcttaggaaggtggcttggtgcatgctctatttgagaaaatggataaacaacaatattaacaggtatcgacatatcatatcatatattgtatattattataattacaacagcagctaccatttattgaagtctttctaagtggcaagcagtctgctaattgctttccatgcattgtctaaccaaatcttcaaccaaatcttcattactccctgtgacaaaagatgcggcaaatgagactttccaagtcacacaaataaatactaaatactaaatagtgcaggcgctttccaatacacaagactgtgtgttatttccaattcaaattcgtatgctgttccatagtcccgtgctgtgtgcaatggccacatcctgaattgaagacaatacgtttttcgtgcaaaggtacctgggtatgctagggtttagttaccacttcgctttttaaccttagaagaaaaattcactgcccactgataggtttctgggcaagtggttttgtggggtgacttctgtctgagagcaataagaacttgctcataatagtgagcactggtttaagcacctcatagactggcatttctgcctcccacaagataactggacctggcttaggaatctgaatagcagcatgcatggagtgcttctatgtgtcaagcactgttttaagcacgtttgaaataactcacttcatttgaaataactgagtctacatgatgactgtaaaaggttggttctgttgttacctgcattttaccgatgaggaaactgaagccttcagaagtgcagtcacttgtccagggccacatagcaggctgagatttgaaccgccaggccttttgactccagagcttacactcttaactccattcatctgctaagtccttccctgtcctcttgcaagatgccttaatccagggattatcaaactttttcttaaaatcaggagaacctcattgcaaaccaattcatacctagattccacagaatcaaagatgcagccgagttacccattgagctggagtgggggcgtagaattgccctgtttggcctccttgctgacattgctgttcctactgcagcctctgatgcttccccttggaggctcccagacccagttgggcaaccacagtgttgtccgtctgcttctcccagttcagaggctcggctttgccgaagtccctccactcgaagtggcacagagttgaggtctcttccaggcacactggcgttccctcactgggctcctgtccctgccttggtcaacatcctggtgcgcactgggtgggtgactaacaacatttttggagttgtggctggagcccaggtgactactccaaatcacggttttccattctgtgtgagatggcctcatgcctttctatgcctctgacaggcagttctctgaatttcgaaggctcttgtcttaagagactgtcagaagtccctttggcaagggactgtgggcaaaccgcccagcggctgtggtcaattcctctctctgatggcagtagtgctacctagggggccgcctgggtgaaaccggcttttttgcatacttccaaactggttccctgtagctaggggaccaaacaattattgtctgaaccaagatgctcctgagagtgaagagaatgtaaagtgctcagtcctggacagatggtatatatgatcgccgtaaatacagccagcccttgccagaagtgggtctggagaaatggtgcgggggggcgtgaaaagggcttacaacccgcagtcctgtgtctctgctaggtgaattggtagcatcagtcctcactctgcttattcagaccaaaaaattgttaagttcttcccaccaccacggagcacagacttgattaagatccagaaaggtcagccgggtgcagtgacttgcgcctgtaatcccagcactttgggaggccgaggcgggtggctcacttgaggtcaggagtttgagaccagcctggccaacctggtaaaaccctgtctctactaaaaatacaaaaattagccaggcatggtggcccatgccataatcccagctactggcggggctgaggcaggagaattgcttgaacccgggaggcgaaggttgcagtgagctgagatcgtgccatgcactccagcctgggggacagagtgagactctgtctcaaaaaaaaagaaaaaaaaaaatccagaaagatatcatatagaggggaagacagatgtataattatacgttaagtataagatgtggctgctcagatgactgtggggacaggatgccaggggaccacagaggaagagtgctcagcctagggggcagtcagggaagactccgtgggagaggaaatgcccaagctgagtcttaaattagtggggggaagttgggtaccaagggcatgggccaaggcatggaagctaggcagcatggcaggggcatgatagggacgacgggccagctggagtcaacatcatggagagttaggaggtgatgtctgggagtcctggggtcagactgtgctgggccgtggctgccatgttgaagagtctgggctggattctggaggccctggggagccatcatgtggtgtggtcagaggtgcattttggagagtccctggctgcggaaaatggctcaagagatgggcaggttgaaggagggggtttgcatgtctgggcacggccttgccgggaggaatcttagaggtgctcaccgtctggtggggtccaggaacattcatagatggattatgtcccgtgttgttagtgttgttataaagatagggaacaatgttttagctgaataataataagagctaacactattgagtatttactgtgtactaggtaggcgctgtcccaagcactcagcttatgttagtttagagtcctaataaaaccctctgagggaagcactcacgtttatgcatttttcagatggagggttggaggcacagaaagcctccaccatcagtggtagagctggagtttaattccagcctgtctgcctccagaaccaccttctctctaaattcacaacctccctgaaataggggtgaacttttgtcttgtatggtctctgacttccacgtaaagcatggaaacttttgacttgtgatctttgattaaacattaagatcatgtgatgggggtaaaatcagcccccagtaactcattcgtaattaaaaaataaaaagacagcagttgcctttgagatgctccattgtcacagatagtgacactggtcacttggccacttgctgtctgtccccatcagaattgagccagcagccgggtgcagatgagcagtagtgggtaattcatgccacctggtgacagcgcccccatgtcctctcttcttatccaggtggaaaggagactatggaaccaggatccagcagtacttcccatccaactacgtcgaggacatctcaactgcagacttcgaggagctagaaaagcaggtgagtccccctcttcgatcctcttacaggaagaagggatctgcaggtccagtttttcagggagctgtgccatctcagtgggtgaatttttccatgtgctgcttgtggtctctgtggagctctggatcagggaagacacagtgatgatagggaaattgagattgagttgttgtgcgtgagttgctgtgacaagccggccgtgttttaatcaggttgtgctgggcttggaaggatttgaatatgcaggagaattcccgctggagtgaaagtgaccaaatggggaatttgtcctttgcttaagcaacttgcagatgaaacacatttatattggacagccagacattgagaacgtgcttggggcgagtaagcaagtgggcctaaccagaggtgagatgaggccttcctggtgactttgcaaacctggtggttgttccctcgccgcctcttgtttagagagcagccactttcagcgtgctggcaccccaccaaggatgatatctttgtaatgaggattttaagatcccgttagacccccaggtgtttattttctaagggaggtagggcaatctgggaaggcttcctggaggaaggagtatttgacccttaaaagtcaagttagagttcaacagcaagagactggcagaagagaggtgcaagtgggaggtacagtctaagcaaaggtgtggcagtgggaatgtggttgtgttccgtgtgcttgggctgaggcagagactggaagcccttgcttcctctgtactgagttgcccttacctgtacatcagcatttacctggtgcagggggtgggggttggggtggtgcaggcaaggagtggatgcctggttctgccacctctcccccaggatattcttcatctcagccagaccctgggatggttcaagggtgcaatgggaggcagagctggaaagggtgatgggggctctgaaagtcttaaaagccaggtcatagagcatgggtgttgcttccacaggacatggggagccacagaaggttcttgagccgggctttagtaggcaaaatagtctcattttctaataaggtcagataaatagtctaggatgtgttttgaaaccagatctgaggaagcattatgaaacctgttctagaattcacaaggcacgtttttacggattggaaaatgaaactccgaacctcctggcaccctctccccgccaggtccctatcagctccatgcttcattatttagctctctccccatggacgtatctggtaatgaaaatgcattttaaacagttccacaggccgtatctctgctaaacggtgtgctttggaaacgggttttctttttattattcccgttacaactaacgtgagttatgtcttgtttcttcacagattattgaagacaatcccttagggtctctttgcagaggaatattggacctcaatacctataacgtcggtacgtgcacacatcatcttagcctggatttccacccctatcccccatgggctgacctcagccccgccctacacagggaggtggctgacacagggtcctgtcttgaatgccagctccttccctggctgaagctgagtatttaggtcaggctggtcagtgagtatgatgctatgtctgctattaatctctactaaaactgtaagtgctaaaacaaggtctcgtacataagtgctagatggtggttagcggatattattaccagcgtcactcttattatttcaggatccatctgtgtttcccatgcgttgcgaaggaaagctgagctgtcagcctggctgaaatgccgcgtggagttgggagtcttgggttctaaacccagctctgcctctctctcgctatgagactacaggcctgtcacttctcctctttgaacctctgcttcctggttgctcggctggggcccaggaaacccagcccgcccacgttgaccatgctgcaacgggatgtgaaggcgtggccccaaggctaggcttgtccagtggtggccagggtctgatgtgtgctgggtttcctgggtcttgagcctgcctgctttgaagtgggtgtggtgcagctcccatgtgaagggactctgtagcgggcctccttgttctgggcagcccatgaccctccctgggcaggcacgggcatgctcccctaggactcaggtgacagcagccccaggaacttcctgcttctattgccaatgctctgctttacacattcattcatttattattatttcttttcgcgatagagtctcgctgtgtcacccaggctggagtgcagtggcgtgatcttggctcactgcaacctctgcctcctggattcaagtgattctcctgcctcagcctcctgagtagccgggactacaggcatgggccaccgtgcctggctaatttttgtatttttagtagagctagggtttcgccatgtgggccaggctggtctcaaactgctgacctcaagtgatctgcctgccttagcctcccaaagtgctgggattacaggcatgtgccaccatgcccagcctgctttccacatttataacctgcttctttacctttacaatgatccagcaggataggtaggagagggattctttgctccgattaccagatgggaaaatcaaggtcctaagtgaccgaccaccacatgtgctgaggtcctttgggcaggggggtgcaggatccctgcatccacttctggtgctctttgtatcatcttcccccatccctgtatctgcagagcagaggcacatggctcattggttctgagtagaaatcttggagtcaggtttgaactgagcctcagttttactactactagctgtatgactttccacatgttactttctcttaatgagcctcagttttgcctcctgcaaaatgggcctagcaaaagcagggtgcctttagtctcagctactcaggaggctgaggtgggtggatcccttgagccccaagagtttgagaccagcctggataatgtagcaagagctcaaaattaaaaaaataaaataaaataaagatgcagtacatgtaatctgcttagaatattgcctggtatataagagctcagaaatcttagctactaatattatttggcagataagtttccctgtcataatcttttcttctctgtaagatcctttctctgtgtctggagaacccacgccacatttctctcctagtttctggtgactctttggtgtttttggctcatggctgcattcttcagtctccacatttgcctgcacatggctttctcccttgtgtctgcatctgtttttaaagccatttagctgggtgtggtggctcattcctgtaatcccagcactttgggaggccaaggtgagtggatcgcttgagctcaggagttcgagaccagccctgggcaacatggcgaaacccctctctacaaaaaatacaaaaattagccaggctttgtggtgtgcacctgtggtctcagctactagggaggctgaggtgggaggatcgcatgaacttggaaggtggaggctgcagggagccaagatcgcaccactgcacttcagcctgggtgacagagtgccaccctgtctcaaaaaaaaaaaaaaaaaagccatttaaattatttattctttatatgtaaaagattatatgtaacaacatagaaaattatgcacaatatgctaagtgaaacagttcacaaaattttatgtattgtatgtaaacattttgtaaaaatgccaagttgcttagctatattttaaatatttttaaaatgaacacgtattgttttagtaatttgtaaaaaatatttatgatgagtgtaaaaagcattttctaattggtcaaccaaaaagatattcagtgtttcttttgatcaagacgaacacatgtctataactaaagtggacaagagggtatttttttcaggttctctcatgcattttaatgtttgtttttttttcctgcatgttaagtgtccctctcctttctcttataaggatactcatacttgttggatgttggaattgccctaaatccaggataatctcatattgagatccttaacctaagtacatctgcaacgaccctataaggtcccattcacaggtactggtgacctgacacatcttttcggaggaccctactgaatctactgcatcccttgagtagtcatctgtgatgtgtacttaccccgatggaaagtagacgtccccatcagtgctaaccgtggtcatagcagtggtggttggtccatgagagaaacagctcaggcagggtgcagtctggtctttgtggccctctaataggctgattgggacatttcttattctcttaccccaagtgaaagcccctcagggaaaaaaccagaagtcctttgtcttcatcctggagcccaagcagcagggcgatcctccggtggagtttgccacagacagggtggaggagctctttgagtggtttcagagcatccgagagatcacctggaagattgacaccaaggtaggcacctgctcacccgggtgcaggtgggcctggcattctgagggctttggtgctcagttgggactgtgggtgggtccaggcagcaggatgagcaggcccaggtcctactcagaattcaggaaggagaccaggtggattcagacaattggagcacctcttgttagagagaggcagggatagtggaggtgccctgggaaggtgggtctggttgtctggttcgaaccttcagaaggctgagtgcctgcagcaatgctcattgatgatgtctttgcggccctacatatcttaccaaggaagttactgccttcctcattttgaatattttctttctaagtatcatataaagcagtctggatcctcctgacagaaaacgttcactgagctcacctgcctggagctggaatgggctctgggaacatagcaaatcagcgagacccggttctttccggtggaggaacttcccctctagatgggagtgaccttttcagggctgtcctacctgaagtactagtctctggctggaagtgttttgggaaggtgtgagcttctggataagaataggaggtctggaattgggcagactggagtttgcatcctggcaggggctggaccctgggcaagtaaccacacttctctgggcctcagtttccttgtctgcaaaatgaggagccaaattcctaactcacaagtacttaatcactgccttatcattatatcagagcgacatgggaaagtgccaccctgtcttcgatgatggagtaagggctgtctgttcttgtggctgcagaactggaaagaaattgtagggtttcccatgcacccatttgtttctaaggtagaacttgacccaaagggctgattaaagccttcctggggcctcttgtgccctctgacttctggctagagtcagtgagtctctcctccaagatagtcgcccaccagtggccaggtcatttttttccccttgggagggcctcacatcttggccagtccctggtcacgagaggatccttgactcactcaactcttctgcagggaagtgtcctctttaggagactttgcagaggggactggtccatgggtgccctcgctggtggggcatcgtctttctctgacccaggaactcctgggggccttccctagggctcctaattcttcccatggcttttcacaccaccagccatgggggaggaaccatgagcttgtagccagctgcgctgtccttctggctttcccagtgaaaccatctcttctgccctccagtgtctctgatgccacagtacagctctgaggcacaggggggtgccacgaccctgaggtttatttaaaaaatctccaaatagtgcactccagctctctctactttgcttaatgtggaaaagtgttatttccctagaaggctctgtctctcccctgcctcacacctcctctcctgccgcgtgaaggttcctgaaatgaagctgagctgttcaaggttgctgttggcggcctttggtctgcattcctctctaactggtttttatatttactgagatttcatgagaatgatttttaaagtcctgttattacatctgaggggtaaaaaaactgggacagtagagttgacggagttcccacactgggcacagctaccccttttgcggagctggtgttggggagcaaaggaagaaggccccatcccactcttgggaaaccagcggcggataaactctttgtcactgccaggacctctgcctgtccctaagtgcccgcattgttacacggtctgtagccacctcattgatggcagagggcagtcacaaaatccttctagttagtgggtttccagagcctcaccaactgtattgtgacttcccattctgagatggcttgaggggtgacagctgcaggcctggagagtaattgtcatgctgttttttgttttttttttttgagacagagtctcactctgttgcccaggctactcaacttctttgttaaatggagataattctccctgtcagggtgtggattgacttaggtaatatccctcaagtgcttagcctgtgacggctagagctaagcaccccccaaacagtcaccattattatctaaatattctctcaaggtccccccttggccaataaaagtctgatagaatttggggaggcccaacagggttgcctgctttggggtgaagtgagaagctcatccttacatgcaaggagttagatttgatggtgggtcttctgaagggaggtacctcctgagtccatggcacatggcctgggcactgggtagtggtccccttggacagagccctgatgggcagtcagagctggggagcaggtgtgcaggttttgagggtgcaggggatagagagttatgacgaggatgctggggtccacagagcccccgaggatttgaagaactagaatttgagacactctaacagtgtggctttaggggaggggacaggaggcagagttaaagacagaggggtggtgacagagaagagcccccttccatcctgacctcacctatatttgagggctgtggccaggactgagctgcacaccaaaacctcgtggaaacagctttgtcgagaattttcacagtgagaggaagaaacgagaggggcagggttgtcttcaggaaaggaaaacattcaaccatattaaagatccgagtgtgcaagaaagcaaagtggggatggaggaggaaaaatgcagggcgagctgggaagatgggatttctcgggggcgggcactaaagacagtgaactccaaacaggagaacaacatgaagtactgggagaagaaccagtccatcgccatcgagctctctgacctggttgtctactgcaaaccaaccagcaaaaccaaggacaacttaggtaacatctttcccaagaacatgccctataactccaatgaaaacttaacttcctttagagtctgatattttcagagggggcagagagtgcattctctcattcttaactactcccagtagatggccccaccttgggtttgtcctccgagtgagggagctggtggcagaagcttttttggtgtattagtccattttcatgctgctgataaagacatacccaagactgagtaatttataaggaaaaagaggtttaatggactcacagttccacgtggaggaggcctcacaattatggcagcagaggagagagaatgagaagcaagtgaaaggggaaacccttataaaaccatcagatctcgcgagacttattcagtaccacaacaacggtacaggggaaaccacccccatgattcaattatctcctatcgggtccctcccataacacgtgggaattatgggagctacaattcaaggtgagatttgggtggggacacagccaaaccatatcacccacttagtgggtggatttagttcttactgccattaccacaaacttggtggctgaaaacaacatttattcttgcacagtcctggaggccagagtctgaaatcagtatcatgaggtcaacatcagggtgccagcagggctgtgctccctccggaggggaaagccattcccttcttccagtttctgggggctgctggcattccttggccttctcctcttctgcttccctattataaggacccttgtgatgcattaggtccacctggatattccagaataagcctcccatttcaagctccttaatcacacctgcaaagtctgttctgccatataaagtgacatgcacaggctccagatattagggcctggacatctttgggggccatttaaaaaaaaaaagaccttctaccacattctccaggtagcaagctttttgatgatgctgtacgtatttttttctttgggtgttttgagctgcttccatatctttcatcttagaacagaagaccagccagacaatactagacccctcagttaacttaccgggaggccagtccctaggaacttctaccttcagggactcagcaggctcagcatgttgactgccgggctatcccaccacagctggatgggagagaagatgaggcctgtccccttccctctcctcctgttctcccttccctgcacaggcacccacattgcaaccctacctgtgggctttggcaggtgattctcagtttgttcatcttgtgtctgtggtctctctggatcttcccctcccaagatcttctcttacccaaaaccattcccattctccctcttctataactgtaccacttttgtgttttcttgttcaaggatggtgatagtttaaaaaaaaaagtaaattacagtaattctagcctaaaaggtggtgggaaaactaggcccctttttaatacttggaacccccagagggcaagagtccacagtgataccaattgggacaatatcatcagaaccccttgaatgtcaaagagggagattcctggtttccttttataatctgagcatccagccattgcagcaaacattaagaaaatgcacagatgagacacagaagtactgatgacctttttctctgtgtgcagaaaatcctgacttccgagaaatccgctcctttgtggagacgaaggctgacagcatcatcagacagaagcccgtcgacctcctgaagtacaatcaaaagggcctgacccgcgtctacccaaagggacaaagagttgactcttcaaactacgaccccttccgcctctggctgtgcggttctcagatggtggcactcaatttccagacggcaggtaaaggccgactgaaggtagtcccgtccctgcaaggtggcggttgcagtcactccaggccgagtcaccttgggtcagcgataccatgtggtgtccaagaatgagtgatttgtccgagggactgcacggttcagcagagtaatggttagtatgaggtccagcagctgaatggagggatgagaggaccgaaggctgcttggcttaggcaggcttcgtgattgtaagtaagtgacagaggctgagttagtctggcttagaaaaagaaaatgcattagttcatgtaattaaagcatctttggagttctcttctccaggcctgttgctgtgtgagggctttctgctcagactttcttccagagacatttacatgctggcataactaacatacacaaacttctggacacaaagtgatcgcataaatcatggggctttgtgcttttgttgttgttatttaagacctctttcgagggatctattcatcagtagcgtcctttacattctttttatagccacatcggattccacagaatggaacaatcatttatttaataagtccccgtggaggcacatgtaggtattccccattatttgctgtcatagacagcactgccttctgtaccctgacgtgagcgccattccacagatgtaggaatatgtctatgggacagaattctcagaaaggcagggtgggtcaaacagcgcttgcattttgatcaactttgccctgaggaaaaccactgaagacgtgcctgagctaagccacactgccaaactgccctccatagagatcgtgggcggggatgcaaataggtggaggttggagtacgctcttttggtatgacttcgctgagttttgttgaactttttgccgtttgcacaactgagaggtgaaaactgatacatcgtcgtccattagagcttcttcttgtaagggacattaaccagtttttccctcatttagggagcagtggcattttcttttctggaaactatttgtgcttcttacctgatgtatctactgcagtaggtatttatagcatagatgtatcagaactaagaggttaaaaatttatattcacatatttgtcatttgaattaaaattgcctatgcaatttattgctacatagacacttttagcaagtttgaatcttttcttttatgattcgggatttggtgacatacttggaaaggtgttccccagtctgggagtttgctgtctagaaaccctatattttctttgagtgagatacctatttgaacagctgcctcacattaatttggggaaaaggtgaaattcattccccacctagaaactcctggcctagggggccagcgtgctcatgcctgacttacagcaggcgttcactttccttcccagataagtacatgcagatgaatcacgcattgttttctctcaatgggcgcacgggctacgttctgcagcctgagagcatgaggacagagaaatatgacccgatgccacccgagtcccagaggaagatcctgatgacgctgacagtcaaggtaaagccagccctcccttcctgccaggggagccagccgccctccctgggggctgggccgatgctgtcttgagagcagggaacccatgtctagggaggctggttgtcttgtttaaacgatccccattcaggcagtgtttgaggatctttctttcttacagtacactccagggtcgttctgggagaagagggaagagaggggaaacctcctcaaacccacttccccttgtcctctgtgggggtgaggtatgaccctatctttctggggtcctggtgaggtcagcctctggccggaaagagaaagaaaacatgggaaacagccatttggtcttaatggagaagttttttcccttactttgtccaattccagggctttttaaaattcatctgactttcagagaaagtgttgttgctttgtaagaatttttgaaaagtagagaaatgaattgcatttctcctaaggttaagggcgggcgggtggtagggggaagaagcatacgtaaacacaggcctttaaataaacagcagttataaaaagaatgccacactgttcctcagcctttcctaggggtgtggaaatccagtgattaagctctgccttgatcagaggcacctgcttgggcatggatgtgtgcattcatgagctcaggtgagttttacctgttgagtcaggtggcatatggggccgagacccaggctgatgctgaggaactgtgggatctaccacagtccaccttcatccactgcagaaggttgctccggcttttccagtgaatctaggcaaattagggctggcattgaactcatccagtgtcactctagaacccagctgcaatccacgctaggctgcctgttcaggaccccaggggggttccaatgcttccctttggtgtcccaggttctcggtgctcgccatctccccaaacttggacgaagtattgcctgtccctttgtagaagtggagatctgtggagccgagtatgacaacaacaagttcaagacgacggttgtgagtaagtcagtcaccttggcccctctgcttttaaacgtccggccagtgaatcctttgtgggagtgctcttcgtgggggattttgcaatgctctttagttgtcccagggttttctttcctccctcttgcccacatggttcagcttgaggaggggatacatacaaagggccactttctgaaatccttagactttccccagtgctgtttgcctgcctgtaactcaagtccggaatcgtaggtgaggccctgacactaggttggtcctctctgtgcaacagcccaatctgattaatctcctgagtcaaaggccaagaggcagagacacagagagagggggtgaacctacgtggctgacctgacccagaggatcagcctaacctgggggatcttagcccctagagggcaggagggacaagaggaatgcttgctcttccaggaaaagccaggagggaaccgtgattggtgggccttctaaagcacaggatccttgcccctggtaaaaagtagcccaatgaacaactcagatgctgaccaaataaactggcatttatggagagtggcaggattgctgcttgcctgctctgtgaggctgggctctcccctgccagctgtagaaccccctgctggtggatgtggctcccaggctctcctccccttttgtcttttccaaaatccaccttcctgctctgcaaacaaacacctcccccgttcccttgtccctgatcctggggcggggagatgggaggtggtctccttcctctgctcaccaagggaccagcctgcaacagcagcttccaggattgctcaaggtggggtgggggagtgaagataattattcagattttcttagatcttggcatagatgcatatttatttacatggttgctaaggggattcacagctgaaggatgcggagattgtcttaccagaagggggcagctccaatgtggcctctaatgagctttgatctccttccagatgataatggcctcagccctatctgggctccaacacaggagaaggtgacatttgaaatttatgacccaaacctggcatttctgcgctttgtggtttatgaagaagatatgttcagcgatcccaactttcttgctcatgccacttaccccattaaagcagtcaaatcaggtaagaggcattttaattaagatgttcgatttgggctggcgttgtactttggtttggctgctggcttcaaaaagaatgaaaaatgatttttcctggtttggatggaatcactgtaaaaccgattgggtggcttggagagcaggtgtacagcctgtcgtgtagcacacaggtgggaggaagtgggtgacaggggaggctatgcccctcaaagtgggatgtttacaagcaaaactggattgttagtggatcctcaacctggcactgcagtttgatttcattttgaaatattacatgcggtttgcttctccctagctagggctaagtctggtttgatctccccctcctgctctctggctggcagtgtgagagggtggcaagggagagacctttggcatcttggggggggagtaacaatctcgagggtccaactccccaaacccttcagaattcaccttcttcttctataaaattgggtgggttaatttacttctttgagttgttacagttttcttccctgctgaagaaaacacaagatcccttcatggtataagaagggtcattttgtatttttctgcaaccaagccaagctgggtcatacgaccagctcttaagaaccctgctgaatcccagatgactgagcccttcctacacagctgagatagacacttccaggtgaggggatttgggaccctgctgcttctagagccagtcatttacaaaaacaaaaaaaactggctctccttagcttctatatagtttctctagtttactttcccactggatctttcccactggattttaggtataatatttgacaaataggcccttgctggatgttgaattttccttcttcctcttcctttagtatttctgatgcatggtgcatgagatatgagatcatagattcttctggattcctcaagaggtcactgttcccttgttttctgaggatcatttttcaagagaaagatgactgtcattttagttacttacataaaaaaatacagtcttttgatattgtttggaaacgtggggctcaatgaagagctgaattggatcttttttgttttcagacattccctcaacttccacctttttttgtataatatcataaacctgaccatttctgctactgggcaggagcccagtttctgagcagcaggcatgctagaaaatccaggtgctggccgggcacggtggctcactcctgtaatcataatcccagctacttggaaggctgaggttgcaccactgcactccagcctgggtgacagagcaagactcagaagaaagtgcaggttcctggacccaccacagggtgatgagtcagcccagggtggggccaaggaatctgcatctttaggcagctccccagatggtgcttggatggcactttgacagaaccaaactatgtcaaggctgcctatcttaccattgaggaaatgaattccttagcaagttactagatgaaacaagactttgggaaaatgtttaaagtttctgatttttttttttttttgtactctagaaatgttcattttcatgaacattgctactctagcaataataatgagtattcatttgtaagaggcctgatatttggcaacccttctgggttaactcacccacactgtaaactccccctttttttttttttgagatggagtcttgctctgtcgctcaggctggagtgcagtgggtgatctcggctcactgtaacctctgcctcagcctcctcagtagctgggactacaggtgtacactaccacatctggctaatttttgtatttttagtagagacggggttttgccatgttggtctgaaaaaaagtgatgggattaaaggagtgaaccactgtgcctggcctataaactactttaaacccggcactgatcagggctgtgattccttaatttgcttcttttagattagtctaataaggcttaggaatgacaccaattcttctggtgcaggaagtgtagcttttggtacacctttacgttcctagccttgacgctgtaacagatttctttttatggtaactgcctgccagttcctctactgaactcatccagcagagaggggcagctgtgctgaaaccccttggttaccccgacgtcctcttgaaggatgagggccttgagcctcataacccctcccagtgccttgcagagatgtcagagttgatgataaaacctcgttaccttaatgggcatcaaagtgtgtcaattcatctgcagaatgcaatgacttagcttggagatttagaaaaaacaaaggtcaaaacctcaagggagattaaaaatgtgaccttgtcctcccccgactgtgagatactctcagcagggacctttcctcacttctttctagctcctagcagtgcctggcacatccatattcatgggaggaatgaaatagaatgaacaggaggcattgagggtcttccatactgaaaaaataaacttcacccattgtcattagagatgcactgaagcttttaaaccagttggagcgcaggaaggaaagcagcagcctttattgtgttaggtaccttaaactctttctcttttaatcctcacagtaatcctgtgaaaggggttttatctttggttttaaaattctgagcactttgaggccgagagactatgacttaacttgctcaaggtcacacacctgtaggaccagagctgagattcaaacccaggaatgtctaattaatttcgaaccccgtgttcctcctctgcaggctgccctctcactgggtgctcaaagccagatgcattgatcttactttaaaaggtgtctgtatttccctttccccagtgaaatgactagaaacaagaagaagaaaaacaattattttttttttttttatacaaggagggctgcccagtgcataaaaatgggacttgggcagcgagagaaggtacatagagctggagacagctggtcatgagggcagagctcatgtctccgatttaagaggcacacgcctagtgtcagatagtactgtccagcctggaaccatgctattggagtgtaggggctacctgatagcctcccggaacgccatggagcaaacagtcattccagttcattctaacagtcaatcagcagctagactgtattagtccgttctcacactgctataaagacatacctgagactgggtaatttataaagaaaagaggtttgattggctcacagttctgcaggctgtacaggcttttgtttctggggaggcctcaggaaatttacaatcctggtagaaggggaacaagcacatatttacatggccagcaggaggaaaagagagctagtgaagggggaggtactacacacttttattaaacaaccccatctcgtgagaactcactatcatgagaacagcaagtgggaagtccacccccattatccagtcacctcccacccggccccagctccaacagtggagatcacaattcaacatgagatttgggtggggacacagagccaaaccataacatagatttcttcaccactgtccacagattagctcattagagatgcagaatctcaggcctcaccccagacttcccaagtcagaatctgcattttaacaagattcacaggtgattcacatttgcattaatgttggcatatcactgggctagactgcaagaattctgagtctctatcaaggcaaaaaacaaactagcagcaaaaatcacattgtagcgatagggaaaaataggtcagaaaacttctttacagcagtatattcaatgagagcaatgtccccataaaccctaccaggaaatgagtgggtataaaacattcaggttttataccccctcaaactgtcactcaagtataaaatcaaaggatggatgctctcaaacatgcacagctcaggaattctgtgtcccatgggctcattttgaagagaacaaaagaggacaaatttagccaatgaaggcatccacggaattcagtaagatgatgagcatccagccattaaaaaatataaatttgtacatttccttatgtataaaattgtgtatcagaagaggaacactgtaaagtaatactgagctctgggtggtgagatgcatgctggggaaagtatattgatgtctttgtcatactttgaattgtatacataaataagatggattgatgggtagataaatccatgacaaaacaagtacagtcagccctctggatctgtggactcaaccaaccaagcttgggttgaaaatatttttgaaaacattatgtatcgaacatatgcagacttttttcttattccttaatacagtataacgattatttacacagtatttatattgtcttgggtattaaagtaatctaatttaaaggatatgggaggatgtgcataggttatatgcaaatactacgccactgaattaattatttagagacaaggtcttccctctgtcactgaggctgaaattcagtgttgtgtgatcatagctcatggcagcctcagactcctgggctcaagcaatcctcctgcctcagtcttcctagtagctgggactacaggtgtgcatcactgtgcccagctaaattttttattttattttatttcttgtagagatgggggtcttgctatgttgcctaggctagtcttgaattcctggcttcaagtgatcctcctgccttgccctccccaagtgctaggattacaggcatgagccaccgtacttggccaactatgtcattttatatcagggacttgagcctccaaggattttggtatctggggaggtcctgaacgagtcccccatagatatcaagggccaactgtagagtaaaagtttcgtacaatctaggtggtgggtatacaagtaatccttgtaattttttttagtgttgctgtatgtttaagaattttatattaaaatgccagaaaaacataagcctccctttgtgggagaattatggttacaaaatggaatgcaaatattatataccatgtccatacagaaatgacaatacaccttaggggtgtaaaaggagaaattggggagagaaaaggaacaggtttgtgtaagaatgtgaccttcctcttcataagcagcggaaagtgagagattcagtggatattgtttgaaggtgataaagcaactgagagtataaaatgttccaagagaaataagcccaaaatctgaatggtggaaggcacagaggaaacagtgggagtgtcctattttgggcattacttggagaatcagtagatatgatataaatgctttcaagacaaactaggaccacagaaaccatctctgagatacaatgctaactgggtaaggcactatcatttgtgattaaaagcaactcaaacatatgcataggcaatcttgggaaagatactgttaaccgtggttccttttaggacagagaggaggattgggtgggagtgaccgttctgtttcagccctgtgttcttttatattaaaacaagccagcaaaccaacctttgagatgtgttgccttaaacattactgaatgggggtgggggagattcggctccaacttgcccccctcagccccaaataaaaagaaacatttaaatgactgtgaaagacaggtcctaattgtaaagagggaatggctttaggaggaggaagatcaatactgctatgaactactaagggacagaaagatttcctcccattggaaatctttaaagataaaacacactccctggtcctgtgctttgtaaggctgtaagtggaggaaatggatgaggattcactactcttttggtctcaggagtatttaaggaattgaaccacagctgcaatcactacactcaatgtggaatgttctgtgggttttaatttcttctgagtgaatcatttttatttctagatggtagatatttttaaccttgcttccctgtatggaccagtcagtcatggctgccggcctctgtccctaaccatcaggataggacctctggcttccacaaagtcagcccccagcatggggcactgacttctctaccctttgaactaggcctatgatcccgaggtagcctccaaaaaaaatctaaggtctgacattaattacctgcctttgcattttcctccttgttctgcttcaggattcaggtccgttcctctgaagaatgggtacagcgaggacatagagctggcttccctcctggttttctgtgagatgcggccagtcctggtgagtggagaaacaccagttaagggttccctgagctatgcctgctggtgagggtagaaacggcccgtgaatacaattggcagatggacttaagcccattcagaattgtctagcccaagcatgagacatcatacaagaattcctttttgctaattccccagagtgtcctgggttttccctcccagcatcctcctttcctggagaatgctgtgtgattctgtgtaggcagtgtaggaaagggtgccggtacttgtaagttccccatagtttcacttcagcaagagccaggccagatgatgccttcctagatagactcatcctttctggatgctttttggtgccagtgcatctttaggaatcctatcaaaaagtctgatagcctccaatcaagtagaatgaccataaattaatcaccccccaagctgagcatttagatggaatccatttacaaataaggcgatcatgcacagctttaggtgagtacctttttcctcctttacgccagaattctttccttaggatcaatactcagatatagaattagtgggatcaattaatttagctgaatggtaaaactgtaaaacctgggctttagcagaagccttaaaccagtgagcatgaagaccctttgcttagtgaagcagaccctttgcttagtgaagcttatccctccccagctcactgaagatctgggatttgtgcatctattgcccggggaaagggaaccagtgctgcttctctctatacataaaacccctccgcagacacttcacagaaaagtcaagtgataaaaatggttttagattgtggtagggcagcatttgcctaggcccgctgctctgcaaggctgttgtaaacaaccggaaacattgtaaataatttaagtgattaggtatcaccagcagcagagaaaattagtatatttaaaagaaaattgtgttgatgcagatttgacttccttgatgagggaagcttaatgccggggctgccactgtagggagccaggggcgttgtgtggggttctaaatggaaagtcgacgctcacaaatctgctttctgaaagttttctttagttcagctgctaggtcttgagatttcatttaattccacatctgtcacctggttctgtgccactcacaggtgcagctcggcatttctgtccacactgggatgaagagtcgctcttggaagccgagctgaattgcattcggtagacctgggctttctccttaatgcccacggtcataccttttatttatcaccatatcctctggaagccagggagaaactctggtaaacagcctcaaggcagacttttctgagcaaatgattgatccagtaagggctaagatggagtttactcataaaacctttgctgagatagagtttacagccccagaaaactgtcaataagcactttacacaccttctgaagaagccatttacatgtcacaattactttatcaagtcgcagtcctttactttgctagcagtatgtttgtttagtttataaagagtatttttagcaccattttattacctactgtattttatttaagatgtaagaaaggtgggggagttgaaaagagtcccccagatagcctgtatctaacgaccgttaccatcttggtagatttccattgccttatgattttttgtatatgatatttccatagtcagattcatacaggtgcccttttctacttcacagacgactttaaatgattttcaaagccattgatgcctgtttcatcaggtatgggtccctaattcacttatgctcctactaacggagagtcaagtcgttggcagttctttactttataaataatataggtcttcatgtaatattttctgattaaaaattatttcccaaggctagatatttagcaatggaataataaatcaaagaaaaaaggaccatgtatttttatctgcatgtcaaattgttctctgcaagtaaatagtttctcctaagttgtcgtattatatcccatcttgccattaactggaataggcctccactggaatgatttaacatggtgagatcccgaagaatgggactggggaaaataggaaagcttaaatagtcatcatcttccatgggcaaactggccatttctggagggcacatttgagaaaactggctgccccacgacctgtttagtactgatcctgggtggactgggttctgttttgtgctgggtaggagctaacctgcaaggggtggagaggcccttctttagagtggaagaaaacccaggatgttgtgcactagattaaggcttatcctagagcagatgcttgaatccctttgtagaagattgcacactttagaatcctggaggtccaggactgggagctgcactctggcactgagctggtcctggtttttgaggttgggaaagatttccttacacctggggagacctggagggacacaaaggccctccttatgcctcatcagctaaagttggtcagtttgcctaatgctggctccaaagagcaaaaactgctgtgtttaacatccatgacccaagagtgtgacatgactactgaacacacaaaaccatgagcatgcagtggaaaaagaggaagacagactaaggtacacacctggaacagatggctggcagttgaaactgagccagtggaaacctcagatgatgagaactgtaacacataactcataggatctttcaaagacatccaaggagagcactggagaaagctttctggaattcagagaatagacctgatttgttgcattaaaaaattcagtatataaagagatctgcattagtgacaccaaagataatgtgaaggaaaagtctcacaatctagggcaaccccaccatgagatggaaagaaaggaaaaggtgggctgggaggacagatgccaaggacctaatatgaaagcatgtcccaaaggacaaagttaaacagacggtggagagctattaatgaaatagcgaataaaggaagtgtttctctaatctgctgcttctgagggcccacttggttgcaggtgagatgaatagaaaacacatccataccctcagtaatatttcagtaaaaatgttaagttccaaggataaatttaaaaacctggacttccagcacactagttgtgtataaaggaaactgaataagtctaatatcagacttgtcctctttggtgctgaaaactaaaagactcccaaagtgggtagaatgtggactaggaagacggaataattcagtgtccagcccccgacatgtcaaggaatttcaaggtatgcaatattttagatatatcatgtatcctactcaagggaaatcttgaggcagcccctgaatcgatgattattttagtcagaaaagaaaacttttagatagggaggtgaagagagggaaaccagtgaataattaattttgcagtacagttacatcttacaggatgatgacagtgtgataaaaattttgtcatggtaaatatcaaataaggatttttgaattggaagaaatataccatgataaaaaatgacaatcaaaagctaaaaaataatcaagtatcaacaaagcaaaggcatggaaaggtaaaataaaggtatgctaaaggttatttcaactttgacgactagggaatcagtcagtaaataaactatactgcagagggagatttaatgctacatctgatgttaaaggaaactgtgattttagttagcattgttagactgagggtaaccactgtcagaattgaaaaacagacaagaaataaggaggaaaaaaggagatcaacataaacttgaccaagagagtaaaaataatgtaaagaatcagaataagttaaagcaaggtaaaatgtgtagtaattgaagtgaaatggataagaacttacatttaatttggtgaataggctgaatcctcctattagaaaagaaatctacctgcagtgtttacaacaagaggcctaaaggcaaggtaaataaaacaaataggaatggatggaagagttactgggaaaattgggaaggaaaagttaacatcaatctagaatttacgatcagaagtactacagtgtattaagacgaacaatatgtgatgataaaatgcttgttttctaaagggatataaaagtcattagcaaatagcatagtacctaagtatataagacaaaaattcctacatatacaaagacaactgtataaagaaaaaatctttcagaatttggaaagtcttgtatataagaaatcagcaaagacataatatcaaaataatttgccttaagaaatatacaactttgtgtcctacaaatggataacatacactattttcttctgtctcaaacttcataaatttgattgcattcgttagaaaactttaatacattttttaaaaataatgatttcctaagtcattggctgtaactggactagattcaaaagacacaaaaagatggcaaaattgctcacaatttgaagataataattttctaaatatactaaaacaagtaaattacttagaaagtaaaacatttatgccatagttacatttagaagaggaaagtgcttgccttaaaacttcacgaagaatgaagacgtatgtactactaagtattcatcttcagaacttttaaaacaccaataaaatagaacaaaggaataaaagagatagaaaccaactgaataaaacacaaataaaaataaaaggataaaaagaataaaacattctggtttatcaaaaaggccaaattttgttttgagacagtgtttttttctgtcacccagcctggaatacagtggtgtgatcatggctcactgcagccttgacctcctgggctcaagtgatcttcctgagtagctgggactacaggcatatgccaccatgcctggctaatttaaaatttgtgtgtgtgtgtggagacagggccctgctttgctgcctaggctgctctcagatcctcctgccttagcctccccaagtgctggaattacacgtgtcagccactgtgtccagccctcaaaagaccagttaaactctttgcctacttaataaaagaataaagaggaaaaacatgtaagagtaaatactggaaaggagactgaaccccaaataataaactacagcaaatggatgattaccttaaagaatgtaaataggctaaaattgttctgaaaagcagtagaaaagttaaaacacctattagataaaacaggtttaggatctagatggttttatagcttagttttgtcttcatttaaataacgtaattccaatttcactccaccaaagtaagaagaacaatggaaatccttcttctgtcttgaagctatacaactttcatatcaaaactggagaaagatagtactcctagctttcccctaacctcattcagccgtagaccaatgtcatgtgtgaatatagatgttaaacttcaaaaaatagcaaatatccagctgtttactagaagagcaatatattacaactaagcatttattctggaatgcaaggatggtttaacaccagcacagttagcaacaaattaaatatgaaaaaagcataaactagtagatgccataaatgtaaacagccaaatgaaataatcagtataattttagaaaaaaggtcgagtgatctctattgtatacaaatttaaactgtacaaattctgattgtatagtttacaaaacaggaagacttcaattttaaagagactgatgtttatttttcttgtatttattgaacgtaaccacttctgtctgttctagaagtaacaaacagaaatgtggtgtgggaggaagggacaaatgggacatcccatttgtgatactgacaaaaaccataacacatttaggagtaatttaaataaaggtacagaacttatataagaaaaaaacataaaatcttattaaaaaacaaaacaccatgtgaacaagtagaaatttataccaacccttccaaaattaatgttggattggaattggaggtatcaatataaactcaagttacatatatatttatatatatatattcacacgtagatgaataaatgtgtgtgtttacatgttactacaaatacatacatatcctagctcactctgctgagtgcctagaacttatgacaccccagtcattggattctcaattccagatattgctaaatatcatatgccaataaaaagaaatcagggctccttagacaagtggttgatttccagacatgggataaataaaatataaaaaggacctggagcatcttaacatttcagtaaataaagaagtgctgaaaaaatggtggaagcacatcaaaggggcctaggaaccaaccagggagcgctcccaatggccacagctggaaccatttgcatagcaaaataatgataatatcagattctagcacacagaatgaaatagccacatgtctgtgaatgaatgaatacatgacagagaagagatagctcttccttacaaatgaattctgattaataaatgtagaaggaatgagggaactagaaaatcactattgaaacagcatagtactaactgctgcagtaagacctactgatgaatgcaaaatgaaagttggaggagaaatatatttccattgtcccaaaagtgtcttccgccaagaaatttatcaattagaaagacaaaaatagcagctttacagcggatagaccctgcaggtaccatcttaatcagatgatcaacgttaccaaccacctggaataaggcaggttgaaatcacgtacttcctgaggtgagacgctgagaagggtacattgcttctgtgacattcttgccaaaactgcatcgcctcaaacaaattataagaagacaccagacaaaagttgctggacattcatacaaaataactgactagtattcttccaaagtgtcctgagggaggaatgaggaaaccatacagattgtaggagactaaggcagcacaatgactaaaggttctgtgggatcccggattggatgtgggaacaggaaaaggagactggtggaaaacccagtgaaatatgaataagatctgtagttttagtattgcaccgatattaatttcttagttttgatacttgtactgtggttgtgcgagatgttaacactgtggagtctaggtggttggggtatgtgagaacattgtactattactgtaccttttttgtaagcttaagcttccaacataaaacaatttaaaaggtattggtgggggaaaaactttatttttttgtgtatttttccccccaacaaacaggagaaaaactaaaggcagagagtgccataaagattttgtctcaggccaggtaaaacttattaccaaaagcttcattttctaataaaacaaactaaatttttaagtgaaaactcagactcaaaagaaatccaggaaataagtatcacaaaatgctttctcttgactagagtggtggttcctcaagtcaagagggctggttcatttgctgtagagttattcactaaactgtttctatcttttacgttcttttctgaatgtgcattatatctcatatatatacagtgtacccaggactacagtatgtaatatagctgcaaatattttggcactcaggaaaggtgataaagggttgcagttatagaagcattcatagaaaaggtgaattttgaacttgcgcccgaataacaaatacccattatatagaataaaacaacagaagccattttcttctaggtgcagaaaagggaaagagagacctttcatggtatagtattaagacttaaatggggttttcattttgctttattttttgagacagggtctcattgtcttgcccaggctggagtacagtggcatgatcgtggctcactgcagccttaacctcctgggctcatgtgatcttaccctctcagcctcctgaatagctgggagtacagggtatgccaccatgcctggctaatttctttcattttttatagtaacagggtcccgctatgttgcccaggctggtcttgaactcctggtcaagcaatcctcccacctcagcctcccaaagtgctggggattacatgcctgaggcactgcgcccggcgacttgattcttttcttttctttttccttttctctgaactttattctgtaaaattttactttaagttccaggatacaagtgcaggacgtgtaggtttgttacataggtatacgtgtgccatggtggtttgctgtactcgtcaacctgtcatctaggttttaagtcccacatgcattccccatccgccaactagccatggtgtgtgttgttgccctccctgtgtcctcattgttcaactcccacttatgagtgagaacatatggtatttggttttccattcctgtgttagtttgctggctgaggatgatggcttccagcttcatccatgtccctgcaaaggacattacttcattcatttttgtggctgcatagtattccatggtgtatatgtaccacattttctttatctagtctatcactgatgggcatttgggttggttccatgtctttgctgttgtacatggtgctgcagtaaacttacatgtgcgtgggtctttatagtagaatgatttatattcctttgggtacatacccagtaatgggattgctgggtcaaatggtattgctggttctagatccttgaggaaccaccatactgtcttccacaatggttgaactaattttcattcccaccgacagtgtaaaagtgttcctatttctccacagcctcgccagcatctattgtttcctgactttttaatatgctttattcttaatagggaggaaagtcattactaagtgaagtcattactgactcttcccaatgcctcacttgatacattcacttaatcaccaaggacagcccattttacctctgcttactcttcaacctttgcaaacagctggaataatcatcttctgtcccccttctccaaagtcacagttccagctgttaccctggggactgttttgttaggtcattaaaggaggaaaaaaccttgcagagtatggtctgagtccgtgtttttctaaaagtaaatgacaaaggatcttgtttgtgcacctcaacagatgtttttgtagcacaggagtctttcacttgaactccatcgggaaaggccaattgacttgaccctcctgcaaagccaagcttcacagagtagtcagggatcctctgaaacagatgaggcaaaacatcctcatcctccccctgcattgaaacccaaactccctaccctgagtggcttttgtctttttttctcccctagcgtaatggactattttggttcctgcaactgaaaagtttaggggtaggtcttgtttcagtcatggctgaatctctgtgctcactcagtggctgttttcctctttttctggcacattccaaacttcttgactcaatagcaacgtggccatgacaggaccacacttactctttcagctgatcccaagaaaagaaactctaccaagagcaccaacgaaagtcccacggatgcgtctagttggccttgcttgggtcatgtgcctggaggttgtactggtgggggaagtagaaatcattactggctacaggtgaggcacatgcccatctctgcaagatgtaatttatgataccttggcttttttgggtaacagctttgagagataattcatataaccacatatcatataatcactcatttaaagtgtacaattcaatggtttatagcctattacgtgttgtacagtcatggccacaatcaattttagaacatttccaacacccaaaaagaaacctcacgctcattagctgctgccactcactccatcccccagaccccggtgacctttaacctactttgtctctgtgattttgctagttctggacacttcatataaatggcatcgtgtgatttgtgatcttttagagttgggctcattcacttagcataatgttttcaaggttcatccaccttgcagcttgttaccttgccttttaaggcccttaaaagattttaaattatctgcctcctgcctgccttttagttctcatgtcatgctgtttttttctcctctgctgggttccactttaagcgtgcagctgcttagacacttttgcagtcaggtaaaggccagaaggtgacatgtagaccaaaggaaaaccgggttagattaagaaataggatctacaggaaatgcagtcattatttcaatgttttgcaataaatcaacagtgtaaagaccaagcactttttaaactgcttgcttcccacacaataaataattgtgttttatctttctttggttaaaataggccctggctcttctgggctaatccaagttgcaaaacttctgccccatgctccctttgggcatgcttgtgagatgccaggttcacattttggtttggaaggtgtagtcaccacatggttgttctctcccctgcatcctccaggagagcgaagaggaactttactcctcctgtcgccagctgaggaggcggcaagaagaactgaacaaccagctctttctgtatgacacacaccagaacttgcgcaatgccaaccgggatgccctggttaaagagttcagtgttaatgagaaccagctccagctgtaccaggagaaatgcaacaagaggtaggtcagcccctccacctgcaaaaacttttggggggtctctaggcacggtgatgatgggcaccacgggccaggcttctggaaagccctctgagttgctttcttcagaaatccttggccgggcatggtggctcacaggccaggcatggtggctcatgcctgtaatcccagcactttgggaggctgaggaggttggatcacctgaggtcaggagttcaagaccagcgtgcccaacatggagaaaccctgtctctactaaaaatacaaaaattagctgggcatggtcgtgggcgcctgtaatcccagctacttgggaggctgaggcaggagaatcatttcaacctgggaggcagaggttgcagtgagccgagatcacaccattgcactccagcctgggcaccagagggagactctgtcaaacaaacaaacaaacaaacaaacaaaaaatcctttggcacccttgactctagttctctttgttctagaaattaacctacagtaataccttaggcgcttgccacttcccctaagtagaactgtttcctctagaaggacacttcaatttaatagcgaaaataaatgatgaccactgacttttaaggagtacttattgtgtttccaagaatgggctagtccagcggctctagactgggtcaagatcccccaacagggatgcttgtggttgtgctacaggcatgtaatggggtgcggggcggccggggttgccaagtgtttcataatatgtctaaatcttctaagaaagaatcatccagacaaaaatcctaatagtagccaccaacgagaaactgtgctgcctcccttactcacattattctcattgaatcttcatgtcagcctgcagagtagctcttactctgttttaccattgaggagatttaacctctctgagtctcaacgtcttaccaggaacttggagtctgcctctctgacactcagccctataccatccagctatgaatgactggcaaatgtacagaaagagaaatgttacagagttcagcacgcagcccatttctcatggcccactgctgatggtgaaatctgttttatttcaggttaagagagaagagagtcagcaacagcaagttttactcatagaagctggggtatgtgtgtaagggtattgtgtgtgtgcgcatgtgtgtttgcatgtaggagaacgtgccctattcacactctgggaagacgctaatctgtgacatcttttcttcaagcctgccatcaaggacatttcttaagacccaactggcatgagttggggtaatttcctattattttcatcttggacaactttcttaacttatattctttatagaggattccccaaaatgtgctcctcatttttggcctctcatgttccaaacctcattgaataaaagcaatgaaaaccttgatcaattaagccttctgttgcacgacctgtgcagtgaacaggatttcttttctggccaagaagattctacctctaatgatccaggtaactgatgtccatggaggatgagctggaaatgtaagaaactattcatgagattctgaaaaggattttaactcaaaggcaaatgattccataagggcccaaagagaagccctacccacaggcagcctgctcagttcaatgtactttaactaccaccggctgcctgctgcagtccacaagaaaatggctgagtgatgggatctgttcattaagacaatttctaattaatggtgacagcttgttttgtgactagagttactgggatggagggtaggaatcttggggcctctttgttttaaaaagcccatcagagagaccagagccgtgctgcaggggcaggttctcacttgcccctggctctgccagctgctgggaggctctggccccactagtccctcatggccctactgaactggctgggaggctgctggaatggcccttggtccacagctctccacaggcaagaggtcaactgctgcttgaaagaggtagacaaaagttaggttgatggcgaaatgtctctgggttacccagtcttctggagcagcaagctgagctttaatgggctaagcattagggtgttacagaaaatttcaaatgcagccatctcccttggggcagatctacctagttcatgacagtatgtgcggctggccagggctttacacctctgcatcttaagttgttaatacataccaataatgtaatatggctttttaaaggagaggagagtgctgggttgggaagggaggtggttggtagagtcacaacttctcaatgagtgaatttacagctgatgggaaaaggagtgtaactgtgaaaaacgatggctgtggtggggaagaacaaaccagcagtaagcctgatgtttgatgtggatggaactggcccctagaaacccatctgaccctcctcttgttacccgaaatgctgggcttagtatgcatgtactgctgaaaagcagggcagaacaaatcaggctctgaccagaagatccttctggtcccttcactctacaaaaacttactgatcacctccacatgccaaatacagtgccaagatttgggggtgtggatgtttaaacaaaaagctgtgggtctcatcaatcatctccatccacaagctcctaaaagaaagccatttacctcgcttgaagccaggaacacagggaacagcagtctggccaaggaagggctgttatctggtgctatcactccagttactcctccaactgggagctgctattttatttggcagtcagcaactgaagaaagaacattcctcttagtggcagatgttcaaagcaactttcaagaaaggctaggtgagaaaggcactgggatgagtgctgcaggcactctgtagccagggccccattagcctttggccaggtagccaccagaacctatttattgcacctggcatctcccccaacccctctcagctctgttaggacttccacacagcagagctcaggtgttgctgtcattacctcctttcagctcctcacttcattctactttaaagccacagtgctaaggcctgcatcccctttctgcccaaatgggttttttgctaccatatcaaagaacctgacatatggcggcataggaagcagaagctaagcctctctccagctgctgctgtgtaaaatccatgcgtggccaaagagaagtcaggggattatgacataaatggtgctgggaagaaccctctgcctaaaactgtctccttctcctggtgctacaaccggaatccaccatgagagagtactttcttcggttctttcctcctgtccttgacagagtaacacgttaatctggttcttggtggtgttagggactgattctctcaggaaaggcacacatggtatgatggctcttcccagagtctatgtgatgctacataacttcagtatctagctgagacatgcttcctacatgactgttaaagcacagccaatccaggccaagaagactagtaacaggcacgttctgaaagatggaagcagcactgatagatcaaaaccaccactgcatatgtattacactgtttttgttcaccattttcctaagtgtgttatttagaatattggttattacaaggaaaaataaagtggggaggctggttaggccttgtgagtttgggaaacttaggttataaaaactaaataaagtttttctactgtgagactagatgtgcaggagtgaaaggtgtagagggtcttgttttccaaattcgatctcagaatctttttgccagaagtgtctcatgggacttatctatagtggaacacatttgaagacctactgctctattaagaaggcagccggacaacatgttctaatacttcgtatgctttgtgacctagttaaaatctaaacttaagtcgccatggccagtggcctttagattaagctagccttacccctgggagtataccagagctttccaaggaatacacagactccagtactctcaggggagcagtgttcagagcctcatcttcctgttatattcttctctaagattcatctgcctgagaaaatgcccttttctcaccttacaaaagaaaatatggctgtctccacctctagtcttactgtagagcatgtcccaaggtgtaaaaattcaaaatgtggatatttggaaagtgaaagacttatcaacagggcacaaatctttttgcaaatggattttccaagtttttctggtggttccaaattttttgctttcaacaaagtgggaggaacagcctgtagatttctgagtctcttagcatgtaactacaaaggggttggaagaattcagtgattctgctatcataaagcttccgttcccattgatgtatctgtgtgaacaaggatcaacatctccataaatgaaattgaaaacggaaaatagaattgatgatgaactttggctcaatcttaagatgttatcaatctacatagatgaaataattgtggagaaaagccctctttatctcattaagtgatacatttccaaagaagttttactatgtttaataatttagtgaaatttgggctatgtgtttattgattcagctcaatccagaggaaaattttaaaggcttacagccttaggattataggatactatataatacttttggtacagagatagaattaaataacataaaaatcaaaaatttattaggctaaaattttgagggagaagtggtatgaaaatacaaattcaaggagtaaaaggaaaagtggggcattccttgctactaaaaattgccttgttccaggtaagactgatcataaaaaaatggccctgttcataaaatttttaaaaagatcatagtatctatcaaataacttatattaagaacctcctgggctaaatttaaaaagtaatacaacagttttatttaaacatgtagtgtctacggtatgccagcactttgcagctatttataatgagaaattttagatgtcaatatagcaatgtgcaagaagatagagattttcaaaattcacttaagagtatctgagcataaaatgttaagattgctgatcggatgtgagggcgatctggctgcgacatctgtcaccccattgatcgccagggttgattcggctgatctggctggctaggtgggtgtccccttcctacctcaccgctccatgtgcgtccctcccgaagctgcgcgctccgtcgaagaggacgaccaaccccgatagaggaggaccggtcttcggtcaagggtatacgagtagctgcgctcccctgctggaacctccaaacaagctctcaagattgctgatctagggccactaagtgatgaattgtatttggaagcaaaaaggatggctaaaaaggacctcaacccttttgactttaaaaggaaaatagcttaaccttcaacctgtgtgacatttaactttttgaacccaaccgtaaaagctatcttctaaccaacaaaaagttaataattagatttggaattatacagaattagaaaattggcatttaaaaatactcaataatttgtccctggtttttaattttcaaaatattttctttttgaagagccagattccagtgatcctgcctctcagaaatttccacatttcttatttttcattaggccttaagaagctgcatttgtaaacttgtgtttcattattaaagcttaatttattttttatataaatagtatgtgctttgtgtacatagagaattaagtgaatgagtcacacagatgttggctgttgttaatgtgaaaattaaacagctgtatcacattttgaaaaataaaagtttcatctgaatgaatatagcaatctgcccagaactttttttaaaaactgctattcaccttttatattcccaaataaaacacacacacacatacaataatttagtcatgagataggtagagttacagttattttttgaaatgtgttttactatcctatttatcccacgtttctttgggttacaggtttatcttcagcaaaaactcactctgtgttgaaactcaagtttgtacgattaatacttgagtgctcttcaatttatcagttttgaaagaatgtttagtgttggaaggagcgaggaccttatagtaagtccctgtatttctcagctgagtgataggctccctagaactgtcaatcactgcgtttcttgccaacaatccctggtccacaggaagccatgttgtatctcatacctctgacccccaacccccagcccccagtggttggattagttaccctggtccaaagatttaataatagcctatgacaaacctctgcattagaagatgagcaaggaatagtaaaaagcaaagatgaaattagaactgccaaatgaccactttttaaatggatacaaccataactctcataaagatatataatgaacatatgtcagaaatcttattaattaacaaaggaaccagtgagatgttccagcttgtttaaaggagaatgcagagaacaatatatatacatacagtataggttatccgctatccagattatctgattttatacggtttctccacgttttattgtccgaataatgcaaattattcctgtccgtagaaatgcaaactgtgtcctgtggagattccattgatcattcccttgtggatactgatcactggttttaccagttttatatctattaaatttatttcagcatcgctgatggatgtgaaatctgactcctatcttactccacacacaaaaatcaagtcagttagattatagatcaaaatatgaaagataaaacaatatttctagaaggtcttcacaacatcggcgtagggaaaggttacttaaacaaaactacaaaagcagcatccctgaaggaagactgctaaatttgactcccctaaaattcaaaactggtttttatcaaaagatacaataagaagacagagagaaaagacaagccacagagtagagggagatatttgcaataatgtatctgacaaaagacctcagccaaaaaataactccatcattccaagtcaataagagtaagacaatccatttgagaaaaaggggcatattccggcgtggtggcgggcacctgtagtcccagctactcgggaggctgaggcaggagaatggcgtgaacccaggaggcggagcttgcagtgagtcaagattgcgccactgcactccagcttgggtgacagagccagactccgtctcaaaaaaaaaaaaaaaaaaaaaaaaaaaaaaggggcatatttcatgaataagcacctcacaagagtatatccaaaggcctgataatgtgtaggaaaaagttcactcatgattcctatgggaaaaatgaaaattagaaccatgagataccactacacacttactagagtggcaaaaattaaaagcctaatgtgttagcaagaatgtagagcacctggcacacttgtgtaaattagtacaaaactacattgtaaaaaatgtatgacattctctgctgaaattaaacatatacacaccctgcaacccatcaattccactcctgaatatatacctaatactgaagcatatatatgcacaccaaaagacatatacagagtgttcgtagtactgttattcacaataggcaaaaactgaaaagagccttaaatgtccgtctacggaagagttgatatacacatacaaatgcgcatttctacaatagagcaccatacagcaatgacaaatgactgagctgcaactacagtaactgcgtggatggatcacacccatacaagttgagtgaaagcagccacacacacacacacacacacacagcaaagagaagagtgaaatggtatgaattagtagagagacatatagataaaatgcgggatatgtgtaagacggaatagtataaggaggtaaagtggagtggaacagagcccatatatgtaacatggatacgtttacacaatatcgtgtgagaaaagggaaaatacagaacagtgctacccagtgacgccatttacacatatttaaaaactgcacataaaactgcttccaacatacacacagctaagtagataatacaggtataaaaatggactgaaaggaacatcttaatgtcaagacaaggattgagtcacatagcggggaaggcaaaggccatgtgaccgaggcagggagaggtagtttcagcttgagtatgggttttctttcttttttagagagcgggaagtgttgctctgcttgacacaaatgtaaatgcagcctgctctaccaaaaaaagggatacaggcatactcaagctttcttgtccacagatgaatagctagacagagggggcctgtagtcccagctactcgggaggctgaggcaggagaatggcgtgaacctgggaggcggagcttgcagtgagccgagatcgcgccactgcactccagcctgggcgacagagcgagactctgtctcaaaaataaataaataaataaaaataaataaaaaataataataatgaaaatgaggctgggtgcggtggctcatgcctgtaattccagcactttgggaggctgaggtgggtcactcacttgagatcaggagttcaaaaccagcctggcccacatggtgaaaccccatctctactgaaaatacaaaaatgagccaggcacgtggtggcgcgcacctgtaatcccagctactccggacgctgaggcaggagaatcgcttgaaccaaggaggcggaggatgcagtgagccgagattgtaccactgcacaagaaaaaaaaaaaaaaaaaaaaaagaagaaagaaaacgagagagaggggaggagggaaatgagaggggaaaggcggggcggaggtgagaggggtggcggagtggggaagaaggcggtggggaagatggcaggggcgagggagtgggaagaaagactaaaacggcacaaaatgttagccaattattctggagagtgaaaagtggctgttatattattctttccttttttcatttttattttcaaaaaaagcaacaaaaaacaaagttatataaaaaacgtatcaggcagattctaatacaaataaagctgctgcagcattgctaatatcagacaagttacaaaatcaaggttgatatcgctaagaagggcaatgttttacaattctaacagtaatactgcaccagccaattgtgaaggacccaagcttttgcgtgtctcacaacatagcttcgagaagcacagagcagagtgggagaacaaaaatcaacaagttaacaattatagatggagatcagagtgttttctcacaacagcacagattaagaaggcacaaaacaaggataaggagaatctgaaaaacacaagtcaccagcctgatcaaaggtacattaggcttctgcaaacacagagtaaattttggatccagaaaatacaaattttcttcaaacacaggacatttacaaatattgactgtacaacaagccacagagcgggaaacaattttaattgctctaatacaagattaaacttggcgccacatgaaaatcacaaacaaaaagatgctccccaaaagtcctatgatcgcaaagtttaaaagctatttctaaaatatttttagggaatatgttagggaagggacaaaagtatttcaggaaagggacagaactgcccagaaaaaaaatactagaattttaaatgcatttattgtaaaatgagaaaaagtgacaataaatgatctacgctttaacttagaagctagggaaaacactctaaagagggtaaaaaacaagaaaatccaaaaaacaaaactaaaattgataaaatggttcttttaaaagtcaaggggaaaaaaagcagcacaaatcaacactaccaggagtaaaaataattttatagtaagacttttggaagcctagacaaaataggtaatattatattaaaataaaaacgaccaaatgtctaagaatcactaaaaatatgactattccaattatcatccaagaaatagaaaaaacaaataagactaatccaattatcatccaagaaatagaaaaaacaaagacatgcacctcccaccccatggcatcaatttcagatgatttcatgggcaacttctaccaaacattccagagaaagtttttttttttttttttttttttttgttactgtggccaaaagaaaaacccaaaacaacatgacatgagatttaccctgttttttaaagagtacagtacagtgttaactacaggcacaaagtggtacaggtctctagaactttttcaccttgcatgagtgaagcattatatacactgaacagcaatttcccatttcccccagctcctggtaaccaccattctactttatgcttagatgagtttcaatgcttcagatgctttacataagtagaactacgcagtatttgtctttctatgattggcgtattttacttagtataatgtccttcaagatgcaagttgtagcatctgacaggatttccttctgttttctgactgaataatattccatcgtatgcctataccccatgttctttgtccattcatctgtccatgtacactttaagttgtttctacctcttgactatcgtgaatgatgctacgatgaactggagagtgcaaatctctccttcagttcctgattttgattattttagctaaatatgcagaagtgggattgctagaacgtatagtacctctgttttaatttttgaggaacctccacactgctttgcataatgcctgcatcattttacacttctaccaccaacagtgcagaaggtttcctatttctccacatcttcgtcaacacttgttatatacatatttttctaataatgtccatcctaaaagggtgtgaggtgatatttcactgtggcttttacattttctttttttttttaattaaattaaattttattttattgagacagagtctcactctgtcgctcaggctgaagtgcagggctgagatcttggctcactgcaacctctgcctcctaggttcaagagattctcctgactcagcctcccaagcagctgggattacaggtgcacaccaccatacccggctcatttttttgtatttttagtagacatggagtttcaccatgtctgtcaggctggtctcaaactactgacctcaagtgatctgcctgccttggcttcccaaagtgctgggattacaggcgtaagccaccacgcctgggcaatttgcattttcttgaagattagtgatgttgaacatcttttcatatacctgttgaccatttgtatgtcttctttggaaaaatgtctatttaagtcatttgcccatttaaaaaattgtgggtttttgctattgagttataggaattccttgtttttgatattaactccttatcagatgtacagttttcaaatattttctctcaatccagaggttgcctttttactctcctgaatatttcctttgctgtgtgcagaagctttttagtttgatacagttctacttacctttgttttgttgcccaagcttttgaggtcatatccaagaaatcactgctaagacccatgtcatgaagcttttcttctgttttcttctagcagttt

SEQ ID NO: 208 - DNA, 2131 bp, Homo sapiens
gcgtgagcggcgctgagtgacccgagtcgggacgcgggctgcgcgcgcgggaccccggagcccaaacccggggcaggcgggcagctgtgcccgggcggcacggccagcttcctgatttctcccgattccttccttctccctggagcggccgacaatgtccaccacggtcaatgtagattcccttgcggaatatgagaagagccagatcaagagagccctggagctggggacggtgatgactgtgttcagcttccgcaagtccacccccgagcggagaaccgtccaggtgatcatggagacgcggcaggtggcctggagcaagaccgccgacaagatcgagggcttcttggatatcatggaaataaaagaaatccgcccagggaagaactccaaagatttcgagcgagcaaaagcagttcgccagaaagaagactgctgcttcaccatcctatatggcactcagttcgtcctcagcacgctcagcttggcagctgactctaaagaggatgcagttaactggctctctggcttgaaaatcttacaccaggaagcgatgaatgcgtccacgcccaccattatcgagagttggctgagaaagcagatatattctgtggatcaaaccagaagaaacagcatcagtctccgagagttgaagaccatcttgcccctgatcaactttaaagtgagcagtgccaagttccttaaagataagtttgtggaaataggagcacacaaagatgagctcagctttgaacagttccatctcttctataaaaaacttatgtttgaacagcaaaaatcgattctcgatgaattcaaaaaggattcgtccgtgttcatcctggggaacactgacaggccggatgcctctgctgtttacctgcatgacttccagaggtttctcatacatgaacagcaggagcattgggctcaggatctgaacaaagtccgtgagcggatgacaaagttcattgatgacaccatgcgtgaaactgctgagcctttcttgtttgtggatgagttcctcacgtacctgttttcacgagaaaacagcatctgggatgagaagtatgacgcggtggacatgcaggacatgaacaaccccctgtctcattactggatctcctcgtcacataacacgtaccttacaggtgaccagctgcggagcgagtcgtccccagaagcttacatccgctgcctgcgcatgggctgtcgctgcattgaactggactgctgggacgggcccgatgggaagccggtcatctaccatggctggacgcggactaccaagatcaagtttgacgacgtcgtgcaggccatcaaagaccacgcctttgttacctcgagatgtcccttgagctgggtggaggtgttgctgtgagacaatgaaattatggacgtcttttcgcacttggtgaaaacctttcaatgaaggcatatgatttctccatcgcagcattctcccctgtggggtcctagcccttctaagtgccaacctccatcaggcagatggaaggagctggtattaacagacactgtgcagtggcagcttacactctgctttgagagtttgctttcatttgcaggacataggtgcttatggttgtgagctgacagtcattcatcgaacattatctcattcatgactagaggaagttttttctggttaaaatagggctggaatcatctaacacctatagggctagaactctgtaatcaaacattaatgcattaatgttttggcagcaaaagccatccttattggtattaagagggatttaagaaaatgattgcaagcagcgttcattcgaatggttcagattttgctctcagttacattttgataccaacttactaggtagcctttgttgtaaaagctttttagctgttatgttctagtaagggtgtgtggatcaggatcggggagtgagctgggtccacgcttcccaggagtgatgaggctatgatttacttgagctggaacatggttaaggattttatttttatcatcgtcactttattttcacatttaccttcatttctattgagtgacgtgatttcctatttatggaagtgacatagctgcctttagaataattttgtttcatagtaaatgccatgcacaagcctc

SEQ ID NO: 209 - protein, 406 aa, Homo sapiens
MSTTVNVDSLAEYEKSQIKRALELGTVMTVFSFRKSTPERRTVQVIMRQVAWSKTADKIEGFLDIMEIKEIRPGKNSKDFERAKAVRQKEDCCFTILYGTQFVLSTLSLAADSKEDAVNWLSGLKILHQEAMNASTPTIIESWLRKQIYSVDQTRRNSISLRELKTILPLINFKVSSAKFLKDKFVEIGAHKDELSFEQFHLFYKKLMFEQQKSILDEFKKDSSVFILGNTDRPDASAVYLHDFQRFLIHEQQEHWAQDLNKVRERMTKFIDDTMRETAEPFLFVDEFLTYLFSRENSIWDEKYDAVDMQDMNNPLSHYWISSSHNTYLTGDQLRSESSPEAYIRCLRMGCRCIELDCWDGPDGKPVIYHGWTRTTKIKFDDVVQAIKDHAFVTSRCPLSWVEVLL

SEQ ID NO: 210 - DNA, 4389 bp, Homo sapiens
gcgtgagcggcgctgagtgacccgagtcgggacgcgggctgcgcgcgcgggaccccggagcccaaacccggggcaggcgggcagctgtgcccgggcggcacggccagcttcctgatttctcccgattccttccttctccctggagcggccgacaatgtccaccacggtcaatgtagattcccttgcggaatatgagaagagccagatcaagagagccctggagctggggacggtgatgactgtgttcagcttccgcaagtccacccccgagcggagaaccgtccaggtgatcatggagacgcggcaggtggcctggagcaagaccgccgacaagatcgagggcttcttggatatcatggaaataaaagaaatccgcccagggaagaactccaaagatttcgagcgagcaaaagcagttcgccagaaagaagactgctgcttcaccatcctatatggcactcagttcgtcctcagcacgctcagcttggcagctgactctaaagaggatgcagttaactggctctctggcttgaaaatcttacaccaggaagcgatgaatgcgtccacgcccaccattatcgagagttggctgagaaagcagatatattctgtggatcaaaccagaagaaacagcatcagtctccgagagttgaagaccatcttgcccctgatcaactttaaagtgagcagtgccaagttccttaaagataagtttgtggaaataggagcacacaaagatgagctcagctttgaacagttccatctcttctataaaaaacttatgtttgaacagcaaaaatcgattctcgatgaattcaaaaaggattcgtccgtgttcatcctggggaacactgacaggccggatgcctctgctgtttacctgcatgacttccagaggtttctcatacatgaacagcaggagcattgggctcaggatctgaacaaagtccgtgagcggatgacaaagttcattgatgacaccatgcgtgaaactgctgagcctttcttgtttgtggatgagttcctcacgtacctgttttcacgagaaaacagcatctgggatgagaagtatgacgcggtggacatgcaggacatgaacaaccccctgtctcattactggatctcctcgtcacataacacgtaccttacaggtgaccagctgcggagcgagtcgtccccagaagcttacatccgctgcctgcgcatgggctgtcgctgcattgaactggactgctgggacgggcccgatgggaagccggtcatctaccatggctggacgcggactaccaagatcaagtttgacgacgtcgtgcaggccatcaaagaccacgcctttgttacctcgagcttcccagtgatcctgtccatcgaggagcactgcagcgtggagcaacagcgtcacatggccaaggccttcaaggaagtatttggcgacctgctgttgacgaagcccacggaggccagtgctgaccagctgccctcgcccagccagctgcgggagaagatcatcatcaagcataagaagctgggcccccgaggcgatgtggatgtcaacatggaggacaagaaggacgaacacaagcaacagggggagctgtacatgtgggattccattgaccagaaatggactcggcactactgcgccattgctgatgccaagctgtccttcagtgatgacattgaacagactatggaggaggaagtgccccaggatataccccctacagaactacattttggggagaaatggttccacaagaaggtggagaagaggacgagtgccgagaagttgctgcaggaatactgcatggagacggggggcaaggatggcaccttcctggttcgggagagcgagaccttccccaatgactacaccctgtccttctggcggtcaggccgggtccagcactgccggatccgctccaccatggagggcgggaccctgaaatactacttgactgacaacctcaccttcagcagcatctatgccctcatccagcactaccgcgagacgcacctgcgctgcgccgagttcgagctgcggctcacggaccctgtgcccaaccccaacccccacgagtccaagccgtggtactatgacagcctgagccgcggagaggcagaggacatgctgatgaggattccccgggacggggccttcctgatccggaagcgagaggggagcgactcctatgccatcaccttcagggctaggggcaaggtaaagcattgtcgcatcaaccgggacggccggcactttgtgctggggacctccgcctattttgagagtctggtggagctcgtcagttactacgagaagcattcactctaccgaaagatgagactgcgctaccccgtgacccccgagctcctggagcgctacaatatggaaagagatataaactccctctacgacgtcagcagaatgtatgtggatcccagtgaaatcaatccgtccatgcctcagagaaccgtgaaagctctgtatgactacaaagccaagcgaagcgatgagctgagcttctgccgtggtgccctcatccacaatgtctccaaggagcccgggggctggtggaaaggagactatggaaccaggatccagcagtacttcccatccaactacgtcgaggacatctcaactgcagacttcgaggagctagaaaagcagattattgaagacaatcccttagggtctctttgcagaggaatattggacctcaatacctataacgtcgtgaaagcccctcagggaaaaaaccagaagtcctttgtcttcatcctggagcccaagcagcagggcgatcctccggtggagtttgccacagacagggtggaggagctctttgagtggtttcagagcatccgagagatcacctggaagattgacaccaaggagaacaacatgaagtactgggagaagaaccagtccatcgccatcgagctctctgacctggttgtctactgcaaaccaaccagcaaaaccaaggacaacttagaaaatcctgacttccgagaaatccgctcctttgtggagacgaaggctgacagcatcatcagacagaagcccgtcgacctcctgaagtacaatcaaaagggcctgacccgcgtctacccaaagggacaaagagttgactcttcaaactacgaccccttccgcctctggctgtgcggttctcagatggtggcactcaatttccagacggcagataagtacatgcagatgaatcacgcattgttttctctcaatgggcgcacgggctacgttctgcagcctgagagcatgaggacagagaaatatgacccgatgccacccgagtcccagaggaagatcctgatgacgctgacagtcaaggttctcggtgctcgccatctccccaaacttggacgaagtattgcctgtccctttgtagaagtggagatctgtggagccgagtatgacaacaacaagttcaagacgacggttgtgaatgataatggcctcagccctatctgggctccaacacaggagaaggtgacatttgaaatttatgacccaaacctggcatttctgcgctttgtggtttatgaagaagatatgttcagcgatcccaactttcttgctcatgccacttaccccattaaagcagtcaaatcaggattcaggtccgttcctctgaagaatgggtacagcgaggacatagagctggcttccctcctggttttctgtgagatgcggccagtcctggagagcgaagaggaactttactcctcctgtcgccagctgaggaggcggcaagaagaactgaacaaccagctctttctgtatgacacacaccagaacttgcgcaatgccaaccgggatgccctggttaaagagttcagtgttaatgagaaccagctccagctgtaccaggagaaatgcaacaagaggttaagagagaagagagtcagcaacagcaagttttactcatagaagctggggtatgtgtgtaagggtattgtgtgtgtgcgcatgtgtgtttgcatgtaggagaacgtgccctattcacactctgggaagacgctaatctgtgacatcttttcttcaagcctgccatcaaggacatttcttaagacccaactggcatgagttggggtaatttcctattattttcatcttggacaactttcttaacttatattctttatagaggattccccaaaatgtgctcctcatttttggcctctcatgttccaaacctcattgaataaaagcaatgaaaaccttgatcaattaagccttctgttgcacgacctgtgcagtgaacaggatttcttttctggccaagaagattctacctctaatgatccaggtaactgatgtccatggaggatgagctggaaatgtaagaaactattcatgagattctg

SEQ ID NO: 211 - protein, 1251 aa, Homo sapiens
MSTTVNVDSLAEYEKSQIKRALELGTVMTVFSFRKSTPERRTVQVIMRQVAWSKTADKIEGFLDIMEIKEIRPGKNSKDFERAKAVRQKEDCCFTILYGTQFVLSTLSLAADSKEDAVNWLSGLKILHQEAMNASTPTIIESWLRKQIYSVDQTRRNSISLRELKTILPLINFKVSSAKFLKDKFVEIGAHKDELSFEQFHLFYKKLMFEQQKSILDEFKKDSSVFILGNTDRPDASAVYLHDFQRFLIHEQQEHWAQDLNKVRERMTKFIDDTMRETAEPFLFVDEFLTYLFSRENSIWDEKYDAVDMQDMNNPLSHYWISSSHNTYLTGDQLRSESSPEAYIRCLRMGCRCIELDCWDGPDGKPVIYHGWTRTTKIKFDDVVQAIKDHAFVTSSFPVILSIEEHCSVEQQRHMAKAFKEVFGDLLLTKPTEASADQLPSPSQLREKIIIKHKKLGPRGDVDVNMEDKKDEHKQQGELYMWDSIDQKWTRHYCAIADAKLSFSDDIEQTMEEEVPQDIPPTELHFGEKWFHKKVEKRTSAEKLLQEYCMGGKDGTFLVRESETFPNDYTLSFWRSGRVQHCRIRSTMEGGTLKYYLTDNLTFSSIYALIQHYRETHLRCAEFELRLTDPVPNPNFSKPWYYDSLSRGEAEDMLMRIPRDGAFLIRKREGSDSYAITFRRKVKHCRINRDGRHFVLGTSAYFESLVELVSYYEKHSLYRKMRLRYPVTPELLERYNMERDINSLYDVSRMYVDPSEINPSMPQRTVKALYDYKAKRSDELSFCRGALIHNVSKEPGGWWKGDYGTRIQQYFPSNYVEDISTADFEELEKQIIEDNPLGSLCRGILDLNTYNVVKAPQGKNQKSFVFIPKQQGDPPVEFATDRVEELFEWFQSIREITWKIDTKENNMKYWEKNQSIAIELSDLVVYCKPTSKTKDNLENPDFREIRSFVETKADSIIRQKPVDLLKYNQKGLTRVYPKGQRVDSSNYDPFRLWLCGSQMVNFQTADKYMQMNHALFSLNGRTGYVLQPESMRTEKYDPMPPESQRKILMTLTVKVLGARHLPKLGRSIACPFVEVEICGAEYDNNKFKTTVVNDNGLSPIWAPTQEKVTFEIYDPNLAFLRFVVYEEDMFSDPNFLAHATYPIKAVKSGFRSVPLKNGYSEDIELASLLVFCEMRPVLESEEEKSCRQLRRRQEELNNQLFLYDTHQNLRNANRDALVKEFSVNENQLQLYQEKCNKRLREKRVSNSKFYS

SEQ ID NO: 212 - DNA, 4668 bp, Homo sapiens
tccctccaggggcccaagagccactggtactcagtgtctgggtgggggcaggggggatttttgttctcccagcacctgcggctgttgagaccagagaagctggtggtcgaccacagcctggggtattagttcacccctagcttctccccagcgagaccccagggcccttgggcacaggggattaagcctctatctgcttacgtgcaagcggaagaaataggcccagagagcaacagtggcgggtctgcagtcacacagccaacttgcgcttgtggcagtggcaaggttgaagttctgagggtacccctcactcaagctccaggcgtcaggaaaagaacattccacgaagtccatctggaagacggtcctttccctgctgcccccagcttcctgatttctcccgattccttccttctccctggagcggccgacaatgtccaccacggtcaatgtagattcccttgcggaatatgagaagagccagatcaagagagccctggagctggggacggtgatgactgtgttcagcttccgcaagtccacccccgagcggagaaccgtccaggtgatcatggagacgcggcaggtggcctggagcaagaccgccgacaagatcgagggcttcttggatatcatggaaataaaagaaatccgcccagggaagaactccaaagatttcgagcgagcaaaagcagttcgccagaaagaagactgctgcttcaccatcctatatggcactcagttcgtcctcagcacgctcagcttggcagctgactctaaagaggatgcagttaactggctctctggcttgaaaatcttacaccaggaagcgatgaatgcgtccacgcccaccattatcgagagttggctgagaaagcagatatattctgtggatcaaaccagaagaaacagcatcagtctccgagagttgaagaccatcttgcccctgatcaactttaaagtgagcagtgccaagttccttaaagataagtttgtggaaataggagcacacaaagatgagctcagctttgaacagttccatctcttctataaaaaacttatgtttgaacagcaaaaatcgattctcgatgaattcaaaaaggattcgtccgtgttcatcctggggaacactgacaggccggatgcctctgctgtttacctgcatgacttccagaggtttctcatacatgaacagcaggagcattgggctcaggatctgaacaaagtccgtgagcggatgacaaagttcattgatgacaccatgcgtgaaactgctgagcctttcttgtttgtggatgagttcctcacgtacctgttttcacgagaaaacagcatctgggatgagaagtatgacgcggtggacatgcaggacatgaacaaccccctgtctcattactggatctcctcgtcacataacacgtaccttacaggtgaccagctgcggagcgagtcgtccccagaagcttacatccgctgcctgcgcatgggctgtcgctgcattgaactggactgctgggacgggcccgatgggaagccggtcatctaccatggctggacgcggactaccaagatcaagtttgacgacgtcgtgcaggccatcaaagaccacgcctttgttacctcgagcttcccagtgatcctgtccatcgaggagcactgcagcgtggagcaacagcgtcacatggccaaggccttcaaggaagtatttggcgacctgctgttgacgaagcccacggaggccagtgctgaccagctgccctcgcccagccagctgcgggagaagatcatcatcaagcataagaagctgggcccccgaggcgatgtggatgtcaacatggaggacaagaaggacgaacacaagcaacagggggagctgtacatgtgggattccattgaccagaaatggactcggcactactgcgccattgctgatgccaagctgtccttcagtgatgacattgaacagactatggaggaggaagtgccccaggatataccccctacagaactacattttggggagaaatggttccacaagaaggtggagaagaggacgagtgccgagaagttgctgcaggaatactgcatggagacggggggcaaggatggcaccttcctggttcgggagagcgagaccttccccaatgactacaccctgtccttctggcggtcaggccgggtccagcactgccggatccgctccaccatggagggcgggaccctgaaatactacttgactgacaacctcaccttcagcagcatctatgccctcatccagcactaccgcgagacgcacctgcgctgcgccgagttcgagctgcggctcacggaccctgtgcccaaccccaacccccacgagtccaagccgtggtactatgacagcctgagccgcggagaggcagaggacatgctgatgaggattccccgggacggggccttcctgatccggaagcgagaggggagcgactcctatgccatcaccttcagggctaggggcaaggtaaagcattgtcgcatcaaccgggacggccggcactttgtgctggggacctccgcctattttgagagtctggtggagctcgtcagttactacgagaagcattcactctaccgaaagatgagactgcgctaccccgtgacccccgagctcctggagcgctacaatatggaaagagatataaactccctctacgacgtcagcagaatgtatgtggatcccagtgaaatcaatccgtccatgcctcagagaaccgtgaaagctctgtatgactacaaagccaagcgaagcgatgagctgagcttctgccgtggtgccctcatccacaatgtctccaaggagcccgggggctggtggaaaggagactatggaaccaggatccagcagtacttcccatccaactacgtcgaggacatctcaactgcagacttcgaggagctagaaaagcagattattgaagacaatcccttagggtctctttgcagaggaatattggacctcaatacctataacgtcgtgaaagcccctcagggaaaaaaccagaagtcctttgtcttcatcctggagcccaagcagcagggcgatcctccggtggagtttgccacagacagggtggaggagctctttgagtggtttcagagcatccgagagatcacctggaagattgacaccaaggagaacaacatgaagtactgggagaagaaccagtccatcgccatcgagctctctgacctggttgtctactgcaaaccaaccagcaaaaccaaggacaacttagaaaatcctgacttccgagaaatccgctcctttgtggagacgaaggctgacagcatcatcagacagaagcccgtcgacctcctgaagtacaatcaaaagggcctgacccgcgtctacccaaagggacaaagagttgactcttcaaactacgaccccttccgcctctggctgtgcggttctcagatggtggcactcaatttccagacggcagataagtacatgcagatgaatcacgcattgttttctctcaatgggcgcacgggctacgttctgcagcctgagagcatgaggacagagaaatatgacccgatgccacccgagtcccagaggaagatcctgatgacgctgacagtcaaggttctcggtgctcgccatctccccaaacttggacgaagtattgcctgtccctttgtagaagtggagatctgtggagccgagtatgacaacaacaagttcaagacgacggttgtgaatgataatggcctcagccctatctgggctccaacacaggagaaggtgacatttgaaatttatgacccaaacctggcatttctgcgctttgtggtttatgaagaagatatgttcagcgatcccaactttcttgctcatgccacttaccccattaaagcagtcaaatcaggattcaggtccgttcctctgaagaatgggtacagcgaggacatagagctggcttccctcctggttttctgtgagatgcggccagtcctggagagcgaagaggaactttactcctcctgtcgccagctgaggaggcggcaagaagaactgaacaaccagctctttctgtatgacacacaccagaacttgcgcaatgccaaccgggatgccctggttaaagagttcagtgttaatgagaaccagctccagctgtaccaggagaaatgcaacaagaggttaagagagaagagagtcagcaacagcaagttttactcatagaagctggggtatgtgtgtaagggtattgtgtgtgtgcgcatgtgtgtttgcatgtaggagaacgtgccctattcacactctgggaagacgctaatctgtgacatcttttcttcaagcctgccatcaaggacatttcttaagacccaactggcatgagttggggtaatttcctattattttcatcttggacaactttcttaacttatattctttatagaggattccccaaaatgtgctcctcatttttggcctctcatgttccaaacctcattgaataaaagcaatgaaaaccttgatcaattaagccttctgttgcacgacctgtgcagtgaacaggatttcttttctggccaagaagattctacctctaatgatccaggtaactgatgtccatggaggatgagctggaaatgtaagaaactattcatgagattctg

SEQ ID NO: 213 - protein, 1251 aa, Homo sapiens; identical to SEQ ID NO: 211

SEQ ID NO: 214 - DNA, 49703 bp, Mus musculus
  misc_feature (1)...(49703): n = A,T,C or G
actctccagactgcctgcccaatagctgaatgacagtcaccttgcctttgaatatgtgaggaaatcccttgaccgtggatttctatttggtgctctccccacatttgctctgtgactgacactggtaaccctgcctgactggaggctttttattaatggagagttacttagcaaatacgaatacatagaggaacaagcaaggttgaccaaagttgtacttttcgagctcagatcttcatgcactttagagggaagataccagactcaacctaaattttgcctctgttcattttcttttcctgtcggtggtaaagatagaattgagtcaatgaatgatattctgaggggaatcttaaaaaagcaaatcagaagaatgtacagctgctgagaaaagcagtatggaaatttgtcacagtgtataaattagggttggtgagatggctcagtgggtcaaggtgtgtatgttgctgagcctgcaactcactgtggcttgtggcgctcagagttccacttccctgcaccagttgtacctcttgctgtctctgttgtgtgcaaaagaaactcactttctccattacacccactcccgggtctacctctgcagttagttctgtgggtgactgggagaggcagtctgttcgtgatgtcacattagaaaggagctgaggtctcttcaggcttctgatgtggccccctgtgcctgtgttgaagacagaatgtgacgcagccaggtgtggaggtggtgaccctcatgtgatggacagcctgttggtgatcagccctggggagccttgggcggccctacccggatgacctgtggggtgtttctcatgcactgcctttttcttcagggctgcaggacactggcttgggctgtgagaaggcagagggctttcttgccagcgctttttctaaatataagcctacactaaagcaagctgttggagcgtcccacatgaaggtcacttgtgaaaggggagcttttgggcacaccataagccatctggcttcacctacgtcatctgggtgaatctgttatactcaggaaatagtatcacctacagaggccctgtcacatagcaggggtctttggtatcataccctaaggattgggcagtgctgccttctcccagcctgcggtgagttcttgtgagctgtctgcctcttgtttccttcttagtctatttactgtcctcagagctgtgccacttgtgaatgagacagagaaccaccaccgccaccctcactccgaaacccaaggccttgttgtttttaatgaaggacactaatgaaaatgtgtcatttgttgggagagttttgtagaaatgtcagtgtgagcaaaattgtgcccactcacgccttcgccagcactggcttggagccatgtggggtataagtgggattttaatttgatgtatttgggaatttacctcaggggtaaccatgtggcactgactgcaggtctgtgaggtttttctagcttttgatgggttttccgagggctctaacttgcagggctgtggctgggaccctgccctggtagggaggggtctggtcaagtgaccgataagcttggcatgtcttgattacttagatggctccttgatgattactgaggtcatggtcaaaagaagtaaaaataatgagcagacttggctctatttagttatgtttttgtttttaaaaatacttacagttttacatttgattgattgattgggggtggttcaggggcacactcacataccacagtacacacccacactcaccccccccccacataccacagcacacacacaccacagcacacatatatacatacacacacacaaacacaccccacagtacacacacacaccatacacacatgccacagcacacacacatgccatagcatacacaccacagcacacacacacacacgaaacagtacacacatacaccacatacacacacacacacacacaccccataaacacatgccacagcacacacacatgccatagcacacacaccacagcgcacacacacacacacacacacacacacgaaacagtacacacatacaccacatcacacacacacacacaccccataaacacatgccacagcacacacacatgccacagcacacacaccatacacacacacacacaccacagcatacatacaccacagcacactcacacatacacacaccctgttctctctctgtgctatctctgtctgtctttctgtctctctgtctctgtctctgtctctgtctctctctctcattctgtggaagctaccaacgtggctgtggggacgctgtcttcagagtctgtggtgttcaatctttatggtgtctggatgtggtgagagccgaagcaggtgtggacatggctttagtcttgttaaaaatcatatgttgagcggtcgccatcttggttccgggactcagcagaacttaggaaattagtctgaacaggttagagggtgcgccagagaaccggacagctgctgggacgggcagaagcacagagccgctgaggcagcacccttggcgggctgcagacagccggccaccgtccggaccagaggacaggtgtccgcctggcttgggaggcggcctcagcctcagcagcagcggtcgccatcttggttccgggactcagcagaacttaggaaattagtctgaacaggttagagggtgcgccagagaaccggacagcttctgggacgggcggaagcacagagccgctgaggcagcagccttggcaggccgcagacagccagccaccatccggaccagaggacaggtgtccgcctggcttgggaggcggcctcagcctcaggagcagcggtcaccatcttggttccaggactccctggaacttaggattttagtctgaacaggtgagagtctgcaccacagaagctgacagcttctgggaactgccaaagcaacacagcttctgagagaggccctgttttgggccttcttcttcgaccaggaggaggtccaaaaacaagatatctgcgcaccttccctgtaagagagcttgccagcagagagtgctctgagcactgaaactcagaggagagaatctgtctcccaggtctgctgagagacggtaacagaatcaccagaagaacaatctctaaacagagtcaactataactactaactccagagattaccagatggcgaaaggtaaacgtaggaatcctactaacaggaaccaagaccactcaccatcatcagaacccagcactcccacttcgcccagtccagggcaccccaacacacccgaaaacctagacctagatttaaaagcatatctcatgatgatggtagaggacatcaagaaggactttaataaatcacttaaagaaatacaggagaacactgctaaagagttacaagtcttaaagaaaaacaggaaaannnnnnnnnnnnnnnnnnnnnnnnnnnnnnnnnnnnnnnnnnnnnnnnnnnnnnnnnnnnnnnnnnnnnnnnnnnnnnnnnnnnnnnnnnnnnnnnnnnnnnnnnnnnnnnnnnnnnnnnnnnnnnnnnnnnnnnnnnnnnnnnnnnnnnnnnnnnnnnnnnnnnnnnnnnnnnnnnnnnnnnnnnnnnnnnnnnnnnnnnnnnnnnnnnnnnnnnnnnnnnnnnnnnnnnnnnnnnnnnnnnnnnnnnnnnnnnnnnnnnnnnnnnnnnnnnnnnnnnnnnnnnnnnnnnnnnnnnnnnnnnnnnnnnnnnnnnnnnnnnnnnnnnnnnnnnnnnnnnnnnnnnnnnnnnnnnnnnnnnnnnnnnnnnnnnnnnnnnnnnnnnnnnnnnnnnnnnnnnnnnnnnnnnnnnnnnnnnnnnnnnnnnnnnnnnnnnnnnnnnnnnnnnnnnnnnnnnnnnnnnnnnnnnnnnnnnnnnnnnnnnnnnnnnnnnnnnnnnnnnnnnnnnnnnnnnnnnnnnnnnnnnnnnnnnnnnnnnnnnnnnnnnnnnnnnnnnnnnnnnnnnnnnnnnnnnnnnnnnnnnnnnnnnnnnnnnnnnnnnnnnnnnnnnnnnnnnnnnnnnnnnnnnnnnnnnnnnnnnnnnnnnnnnnnnnnnnnnnnnnnnnnnnnnnnnnnnnnnnnnnnnnnnnnnnnnnnnnnnnnnnnnnnnnnnnnnnnnnnnnnnnnnnnnnnnnnnnnnnnnnnnnnnnnnnnnnnnnnnnnnnnnnnnnnnnnnnnnnnnnnnnnnnnnnnnnnnnnnnnnnnnnnnnnnnnnnnnnnnnnnnnnnnnnnnnnnnnnnnnnnnnnnnnnnnnnnnnnnnnnnnnnnnnnnnnnnnnnnnnnnnnnnnnnnnnnnnnnnnnnnnnnnnnnnnnnnnnnnnnnnnnnnnnnnnnnnnnnnnnnnnnnnnnnnnnnnnnnnnnnnnnnnnnnnnnnnnnnnnnnnnnnnnnnnnnnnnnnnnnnnnnnnnnnnnnnnnnnnnnnnnnnnnnnnnnnnnnnnnnnnnnnnnnnnnnnnnnnnnnnnnnnnnnnnnnnnnnnnnnnnnnnnnnnnnnnnnnnnnnnnnnnnnnnnnnnnnnnnnnnnnnnnnnnnnnnnnnnnnnnnnnnnnnnnnnnnnnnnnnnnnnnnnnnnnnnnnnnnnnnnnnnnnnnnnnnnnnnnnnnnnnnnnnnnnnnnnnnnnnnnnnnnnnnnnnnnnnnnnnnnnnnnnnnnnnnnnnnnnnnnnnnnnnnnnnnnnnnnnnnnnnnnnnnnnnnnnnnnnnnnnnnnnnnnnnnnnnnnnnnnnnnnnnnnnnnnnnnnnnnnnnnnnnnnnnnnnnnnnnnnnnnnnnnnnnnnnnnnnnnnnnnnnnnnnnnnnnnnnnnnnnnnnnnnnnnnnnnnnnnnnnnnnnnnnnnnnnnnnnnnnnnnnnnnnnnnnnnnnnnnnnnnnnnnnnnnnnnnnnnnnnnnnnnnnnnnnnnnnnnnnnnnnnnnnnnnnnnnnnnnnnnnnnnnnnnnnnnnnnnnnnnnnnnnnnnnnnnnnnnnnnnnnnnnnnnnnnnnnnnnnnnnnnnnnnnnnnnnnnnnnnnnnnnnnnnnnnnnnnnnnnnnnnnnnnnnnnnnnnnnnnnnnnnnnnnnnnnnnnnnnnnnnnnnnnnnnnnnnnnnnnnnnnnnnnnnnnnnnnnnnnnnnnnnnnnnnnnnnnnnnnnnnnnnnnnnnnnnnnnnnnnnnnnnnnnnnnnnnnnnnnnnnnnnnnnnnnnnnnnnnnnnnnnnnnnnnnnnnnnnnnnnnnnnnnnnnnnnnnnnnnnnnnnnnnnnnnnnnnnnnnnnnnnnnnnnnnnnnnnnnnnnnnnnnnnnnnnnnnnnnnnnnnnnnnnnnnnnnnnnnnnnnnnnnnnnnnnnnnnnnnnnnnnnnnnnnnnnnnnnnnnnnnnnnnnnnnnnnnnnnnnnnnnnnnnnnnnnnnnnnnnnnnnnnnnnnnnnnnnnnnnnnnnnnnnnnnnnnnnnnnnnnnnnnnnnnnnnnnnnnnnnnnnnnnnnnnnnnnnnnnnnnnnnnnnnnnnnnnnnnnnnnnnnnnnnnnnnnnnnnnnnnnnnnnnnnnnnnnnnnnnnnnnnnnnnnnnnnnnnnnnnnnnnnnnnnnnnnnnnnnnnnnnnnnnnnnnnnnnnnnnnnnnnnnnnnnnnnnnnnnnnnnnnnnnnnnnnnnnnnnnnnnnnnnnnnnnnnnnnnnnnnnnnnnnnnnnnnnnnnnnnnnnnnnnnnnnnnnnnnnnnnnnnnnnnnnnnnnnnnnnnnnnnnnnnnnnnnnnnnnnnnnnnnnnnnnnnnnnnnnnnnnnnnnnnnnnnnnnnnnnnnnnnnnnnnnnnnnnnnnnnnnnnnnnnnnnnnnnnnnnnnnnnnnnnnnnnnnnnnnnnnnnnnnnnnnnnnnnnnnnnnnnnnnnnnnnnnnnnnnnnnnnnnnnnnnnnnnnnnnnnnnnnnnnnnnnnnnnnnnnnnnnnnnnnnnnnnnnnnnnnnnnnnnnnnnnnnnnnnnnnnnnnnnnnnnnnnnnnnnnnnnnnnnnnnnnnnnnnnnnnnnnnnnnnnnnnnnnnnnnnnnnnnnnnnnnnnnnnnnnnnnnnnnnnnnnnnnnnnnnnnnnnnnnnnnnnnnnnnnnnnnnnnnnnnnnnnnnnnnnnnnnnnnnnnnnnnnnnnnnnnnnnnnnnnnnnnnnnnnnnnnnnnnnnnnnnnnnnnnnnnnnnnnnnnnnnnnnnnnnnnnnnnnnnnnnnnnnnnnnnnnnnnnnnnnnnnnnnnnnnnnnnnnnnnnnnnnnnnnnnnnnnnnnnnnnnnnnnnnnnnnnnnnnnnnnnnnnnnnnnnnnnnnnnnnnnnnnnnnnnnnnnnnnnnnnnnnnnnnnnnnnnnnnnnnnnnnnnnnnnnnnnnnnnnnnnnnnnnnnnnnnnnnnnnnnnnnnnnnnnnnnnnnnnnnnnnnnnnnnnnnnnnnnnnnnnnnnnnnnnnnnnnnnnnnnnnnnnnnnnnnnnnnnnnnnnnnnnnnnnnnnnnnnnnnnnnnnnnnnnnnnnnnnnnnnnnnnnnnnnnnnnnnnnnnnnnnnnnnnnnnnnnnnnnnnnnnnnnnnnnnnnnnnnnnnnnnnnnnnnnnnnnnnnnnnnnnnnnnnnnnnnnnnnnnnnnnnnnnnnnnnnnnnnnnnnnnnnnnnnnnnnnnnnnnnnnnnnnnnnnnnnnnnnnnnnnnnnnnnnnnnnnnnnnnnnnnnnnnnnnnnnnnnnnnnnnnnnnnnnnnnnnnnnnnnnnnnnnnnnnnnnnnnnnnnnnnnnnnnnnnnnnnnnnnnnnnnnnnnnnnnnnnnnnnnnnnnnnnnnnnnnnnnnnnnnnnnnnnnnnnnnnnnnnnnnnnnnnnnnnnnnnnnnnnnnnnnnnnnnnnnnnnnnnnnnnnnnnnnnnnnnnnnnnnnnnnnnnnnnnnnnnnnnnnnnnnnnnnnnnnnnnnnnnnnnnnnnnnnnnnnnnnnnnnnnnnnnnnnnnnnnnnnnnnnnnnnnnnnnnnnnnnnnnnnnnnnnnnnnnnnnnnnnnnnnnnnnnnnnnnnnnnnnnnnnnnnnnnnnnnnnnnnnnnnnnnnnnnnnnnnnnnnnnnnnnnnnnnnnnnnnnnnnnnnnnnnnnnnnnnnnnnnnnnnnnnnnnnnnnnnnnnnnnnnnnnnnnnnnnnnnnnnnnnnnnnnnnnnnnnnnnnnnnnnnnnnnnnnnnnnnnnnnnnnnnnnnnnnnnnnnnnnnnnnnnnnnnnnnnnnnnnnnnnnnnnnnnnnnnnnnnnnnnnnnnnnnnnnnnnnnnnnnnnnnnnnnnnnnnnnnnnnnnnnnnnnnnnnnnnnnnnnnnnnnnnnnnnnnnnnnnnnnnnnnnnnnnnnnnnnnnnnnnnnnnnnnnnnnnnnnnnnnnnnnnnnnnnnnnnnnnnnnnnnnnnnnnnnnnnnnnnnnnnnnnnnnnnnnnnnnnnnnnnnnnnnnnnnnnnnnnnnnnnnnnnnnnnnnnnnnnnnnnnnnnnnnnnnnnnnnnnnnnnnnnnnnnnnnnnnnnnnnnnnnnnnnnnnnnnnnnnnnnnnnnnnnnnnnnnnnnnnnnnnnnnnnnnnnnnnnnnnnnnnnnnnnnnnnnnnnnnnnnnnnnnnnnnnnnnnnnnnnnnnnnnnnnnnnnnnnnnnnnnnnnnnnnnnnnnnnnnnnnnnnnnnnnnnnnnnnnnnnnnnnnnnnnnnnnnnnnnnnnnnnnnnnnnnnnnnnnnnnnnnnnnnnnnnnnnnnnnnnnnnnnnnnnnnnnnnnnnnntggatggacctggagggcatcatcctgagtgaggtaacacattcacaaaggaattcacacaatatgtactcacagataagtggatattagcccaaaacctaggatacccaagatataagatacaatttcctaaacacatgaaactcaagaaaaatgaagactgaagtgtggacactatgcccctccttagaagtgggaacaaaacacccttggaaggagttacagagacaaagtttggaactgagatgaaaggatggaccatgtagagactgccttatccagggatccaccccataatcagcatccaaacgctgacaccattgcatacactagcaagattttatcgaaaggacccagatgtagctgtctcttgtgagaatatgccggggcctagcaaacacagaagtggatgcccacagtcagctaatggatggatcacagggctcccaatggaggagctagagaaagtagccaaggagctaaagggatctgcaaccctataggtcgatcaacattatgaactaaccagtaccccggagctcttgactctagctgcatatgtatcaaaagatggcctagtcggccatcactggaaagagaggcccattggacacacaaactttatatgccccagaacaggggaacgacagggccaaaaagggggagtgggtgggtaggggagtgggggtgggtgggtatgggggacttttggtatagcattggaaatgtaaatgagctaaatacctaataaaaaatggaaagaaaaaaaaatcatatgttgttaaaagtccatgcctaaggaaaaaaaaaaaaaaaatagagccgggcggtggtggcgcacgcctttaatcccagcactggggaggcagaggcaggtggatttctgagttggaggccagcctggtctataaagtgagttccaggacagccagggctatacagagaaaccctgtcttgaaaaaacaacaacaacaacaacaacaacaacaacaacaacaacaaaaagtacatggctaaagatgaattattttgggggggatcaatataggaaaatattccaacacagtgcagagctaaagcactgacagtctctatttcatcttaagggtatgttttcagtgctgggatgctgagcgcacactctgcctctgagccccagttctccctcgccctcaccttgcagctcgcattgctgtaagggtccatttgaactcatggaaattgtaaggtagaaggaatgtttggaatccctttaagaaagaagagaaacgatgtgatagccgtccctcaaacagagagacctgtcgcagtacaaactgccttcccgtctggtgggctctgatgttgggtggggtgatctcacccctaaggaggcagctgaaggaagtgatctgttcaccgaaaaggtggtgttattaagtacgaagaaattaaatgagtcaaatgtcaggttggttatggtacacttacgtaatacacatattgaagttttatgtagtagcctgaggtcgttttctcagcgtctacagtactgtgagcttgtggttggatatgaactttggaggctgccacacaggcctgtttgtacagtaaggatagccttataggatatgtatggaaaacatgggtagtcagtacattgaatgttagaatgtttctctctctccctgtctttttctgattactggggtatatttaaatttcatgatgtatacttataaaacccataatcaacatatattttaaaatgttgatctgttgagacacagcagcacatgttttctccgtggcagtctcattgatgtacgtgatggagattcctctgaactcccatgaggactccaggagccctacccattgacttagtgtattcatggaatgcattcgtctgtgcccaacaccacaatcaaattgagagtatttctaccacctggaaagaaattctagacccagtaacagtcacctcctcatcctttctgtccccacgaacctacctttgtcttcctcctcctccctcctctcctcttcctcctccctcctctcctcttcctcctccctcctctcctcttcctcctccctcctctcctcttcctccctcctcctctcctctgaagtgctgtaccactgagctgcatccccagacttggatctgcccgttctgaacattatatggatgtgcaaactgctccctctgtttagaagccacccaacccctatctatcccaggagatgacaggttcttttctttgctcctagaattggttccatccatcatgaacaacttgctgaatccagacgccattttctcgaacaatgagatgagcctgtcagacatcgaaatatatggctttgattatgattacaccctggtattctattccaagcacctccacacactcatcttcaatgctgcccgggaccttctcatcaacgaacacagggtaaggctacagcgaccctcctcctttttcctttgacccctttggtgtctgaagagtagacagccctgcgcattcatgcccagaccctgcccttgtacagaaactctgtagtgagtggctgcagggtgaagaagcagttttgggtccattccaactttctaagtaactcttaacctagaacctagttgtgtgtatgtgtgtgcatgagtgttcatgtgtgtgtgcaagtgcatgggtgtgtacaagtatgtgtacaggtgggagtcagaaagcaaccttgggcgtcatctttaggagtgttgtctacttcccctgagacagggtctctgattggtctggtgctgttataagtagaaggcagaatcattgaaaagcactagattggagactattgaaatcccactgaatctattagtcactttgataaaaatatcatgataatactaataacatcatacatattgatagagccagtcatacagctgcagattcttctcttgctctgattaaacacttcttccaaggagtgttgagttctgtgccgttctctctgagcacagggccggaaaggcatctgtgttcggaatgcagagtgataggacagttggtttgcagtttaacctcttgctagcaagacagtacaaaaagctcaactccttaaaaaaaacctttaaaaaatttaaaaacaagaataattttggggggctgtaaagatggctcagcagttaagagcactgactgctcttccgaaggtcctgagttcaaatcccagcaaccacatggtggctcacaaccatccataatgagatctgacaccctcttctggggtgtctgaagacagacagttacagtgtatttacatataataaataaataaataagtctttacaaaaaaataatttttcatgaagacagaaatacaagaattgagtgataactatatgtattttcatttcatgttttccaataagcatggtaatgttagaagggctcctgatgtcgtctcctgatttcacacctttgtcagcgtcctctgggtgtgtgtgcatgtgtgtgtgtgtgtgtgtgtgtgtgtgtgtgtgtgtgtacacgtgcattcacatgcacagaagtgagaacgactttcaggagtcagtgtgtgtgtgtgtgtgtgtgtgtgtgtgtgtgtacacgtgcattcacacgcacagaagtgagaacgactctcaggagtcagtgctctttttccaccgtgtggtcctggagattgaactcatatcatcaagcttgacagctaaatgaaaaaaaaaataaagaaataaaaaacgcaggacgagactgcgcttgggtataggggaggagaaggcttattgtagggaaaagggagagcagagcagaggcagggacatctgggacaatccagagtaaacatggcctgactgagctgggccatgtagggacaggagggagaggaaaggagccaccaaccaagaggggtggcctgggccaagagactggcatagccaaaatggtggcggccagaagagctggggatgtgggggaagccgtgtccggtatctgggctggagagttcagagcagggggcagggtatgccagccatggccctgtggcatgtagagactgagggatgctagagaccctggcagccggcgtccactttgatatgttacataggcacctcagccagccatttgccctggctttgaggcctaactgcagcctttacccatggcgccactttgctgatccccttctctccctgttaagtgactggtgaccacctttctgctcagattcaaactccaccaacctctgacacccccacatccattttaagatttttttttttaacggcttagcatatagaaaagctgctgcaataagaccgactatccccctgttcacttccctaatgctgacattctgttcctgttgggccttgtcacgtggagatttgatgctggcatggataccctctctggtgtttcttcatgttggcacagcactgggcaaggcccctcagttagctgacttccgtgctttctgctgtcctcgtttgggatagtgtagcatcgtaggatgtctctcctacgttggcttgttgtttttcctcatggtagaatggattctgggttttgagatgtcagaggccaagtgcagttgtcattgcagaatagcggacatgtcgttgggtgttgcctttgatctactgagggatggatgtttaggcttctccactgcacagagactctccttagcctgtccgtgttgtcctccagggaagtcatttctgcagctgtgagcgagcactctaccgatatgtgagaactcgcttaaaacatgatcttgaggctgggcagtggtggcgcacacctgtaatcccagcacttgagaggcagaggcaggtggatttctgagttcaagaccagcctgatctacagagtgagttccaggacagccaggacttcgcagagaaaccctgtctcaaaaaaacaaaaaaaaaaaacaaaccaaaaaaaccatatgatcttgaacccatgtgcttcttatctctcctgttgccactgccctggactgagcagttgtcttgtctaagtacatcaggggccttcatcttggcaccagcacttctgtttatgtcccattgtctgttctccacctgctagcaagtgagttttttttttaatgaattatgtgtatctgtgtgtattgcacacatgagtgtgtgtccatggagatcagaagagggcattggatccctcagagctggagctataggtggttggaactactggatgtgggtgctggaaactgccctgggccagcactgtctccccagtcttcctctttattttaaagtaagtaaatgtagtcagatggtggtggcacacaccttcaatcccagcactctggaggcagagcaggcagatctctctctgagttcaaagccagtctggtctacatagtcagttccaggacagccagggctatatagagaaaccctgtctccaaaacccaaaccaaacaaacaaacaaattaaacgtaagagaagcaaacactcccccgagctgtctctccattctggaaaatttttaataggcctgttagtgctgccttctgtggtcttctcgcttgccccagacagcacagggctgcttttcctctcagctgtctggcccgcacactggcctctctctctctctagcatggatcactgtgaggcattgtgctctgggagtgttcgctggcccataacatggctcccagggtacagtggaacttccctggaaccgacactgacacttgtattctctgtccctggcacagtgcttgacccaaagtcactcaacaaatgcttgaggtccaggtgtgtgcgctctgccgctggatggaagccagcactctatggaggttgcgctatctttgctttgtctttggtgaggtttgaaagagcttcattttcagccagactcatgatccaggctccgtgaaataccagactaaaagctttgaccgaccagtacgttcacgggcatctgtccttcctgcactgtggaaactgttagccattcagatggttgcagttagccacaaaggtggaacacagccaggctccagcattgtgggagtcaccttagcgtggggggacgcctgagtcttctgtcgaactcaggaattaatgttactagggctattctgaacagggcaaactttgggctttattagcctgctgattaaagtgtttttcctgaagctgttggtctgttgaggctcagctgtttctgtctgtcctcaaagccatggactattggttttcggctgcatggaaatacttccagccagcttgtggagcttctgacttggtagctgctgcctcgaaggagaggggctatactggttagggtttttttgtttttttgttttttgttttttgttttttgtttttttgtcaacttgacacaagctagagttgtttgtgaataggaaactcacttgagaaaatgcctctatcaaattgcctgcaggcaagtctatagggcacttactgagtattgattgatgctgggggcccagcttatagagttccatgtgttgctgggtgctagaagaaagcaggctgggcaggttcctctcggcctctgcttgagttcctgccctgacttcccttgacagtgggtgacctgagagttataagtggaataaatcccccaccccaagttgcttttggtcattgtactggtttttgtttttgtgtgtcaacttgacacaagctggagttaccacagaggaaggagcctcccttgaggaaaggcctccatgagatccagctgtaaggcatgttctcagttagtgatcaaggtggggagggccccttgtgcgtggtgccatccctgggctggtagtcctgggttctatatgaaagcaagctgagcaagccaggggaagcaagccaataactaacaccctccatggcctctgcatcagctccaagttcctgccctgtgtcctgtcctgacttcctttggtgatgagtggaagtgtaagttgaataaagtctttcctccccaacttgcttcttggtcatgttgttttgtacagaaatacaatctctgacaaagacagtcatcatggtgggtttttgttttgttttgtttttaaattttgtatgcattgatgttttatctgcatgtatgtctatacgaagatgtcaaatcccctagaactggagttacaactgtgctctgccatgtgagtgctgggaattgactcaggacctctggaagagcagccagtgcttttaactactgagccgtctctccagctcttgaccatggtgtcttatggagcaatagaaaccctaggatggactctgggctggttgaggatggagtaggtgggttgggggtggactgatgtgacacagatccaaggctcaaccactgtgcagcttggtgacctaatcctcagaactctgaaccacaaacaagcaggagacattgtctcttgcttgctgagcagtgagcttagcacagcatggctgggagatgctcgtgacactccccgaccccatccccaggctaacggaggcttcagacggcaatgctgacctcctttcagtgagcagaaccacatcgtcagggctggtgtagtgtgggctctggcacgcatctcagtaaatatgcagaaccgtacatggtgttcagaagtcttgagaacacccacggggagaaatatcaggttggggatttcttggcccacacacaggtgtaagataaatgagcccaaatgtgacatttaagtcagtgctttgtgcagcctgacttgaaaacttgccatgtgccttcaggcaggtggtgctgggtggttccagggagccaacagcagtgtggcttagcaggctcactgcgggtcttgatgcttgcccagcttttctttctgtaaaatgggcacggcagcaccaacaggcaggcagcagaaactggcaagtgggtgctctcagctctgggtctagggaaagggaaggtcctggattctcatacagtacagaggggagactgacatttttgtataatgtgatcgaggatatgtacttaggaaacggcagacaccaggctgtctccaaaagctccgtgtggtctcagagcagtggaagtgggtgggagccacagggagatggttccctgggacatcacagtggctgtggggttccccagccggcacagctgggcaagagcagcgagcatagtgggagctgtatggacgatccttacagatgctcctcctgaagtgacctcatttggatgtcacggaaatgggcagcttctattgcttaatattcccatgacaaaatacttggcaaggataaagaaggagatttgggcttacagcttgagggtacagtccatcattgcagaggacttggagcaggacccacccctaggctagtggaggctggtcacattgtgtctgtagttaggaagcagcaaggaatgctggtggccagctcagtctttttcattcagtcccatggcacggtgctgcccatatttaggctggtctttgctcctccattagaccaatctagaaacaactcagacatgcccagaggtttgtctccatggtggtattagatcccgtcaggctgacagttaagagcgaccattgcagagcactacatgatggtgttcagtgtgcagatgggttggttcaagaggatgaggtctaatctcagcctggacaacggacagagctcagggcaggatagagacatagaggaccaagccgtggtctgtccctgctggcatcactttcccaccagaatataacgactcccgagcctccgtacagggcagatccgtgcccatcctgagctcagtgccctctttttctttcctttttcttaaagacagggactcaggtagcccaggctacccttgaacccagtgtgtagccgagaatagccttgaactcctgatctttctgccacactttgtaactgctgggggcccaggtgtgcacccccatgtctgtcctcttctttcatccttagctaagccatgtgtcctctctcctctctcagtatcctgtggaaatcaggaagtatgagtatgacccaagctttgccatccggggactccattacgacgtccagcgggtgagtttgatctgctgtctttctcttggtgtttggaaataatgtgctgctcaataaaaccactggcgctttccttggggaacggtttggagtgaagttgtttggggttgcagaactggattacccaaatatatttggtagagctaattggaagaggcattaggaaggcttgcaattggggtgctatttgggagtgccagctaatgctggtaatgtgggagggggagccagctgtcatatgtttttcccttttcctttgctcatatgccatttccttagaaagcacctcagttaacaagcaaagcttttggaaactgcatgcagtggttctcagcctgtgggttgtgaccccccttgggggttgaataaccctttcacagggttggcagtatctaagaccattggaaatcacaggtatttatattatgactgataacagtaacaattatgaagtggcaaggaagataattttatggttgggggtcaccccaacatgaggaacctggggctggagagatgggtcagcattaaaggctaggctcacaacaactgtattcaagggtcgcagcattaggaaggttgagaaccactgtgttaaggaaacgtaatgatttataaacgtaatgatttataaacgaaatgatttataacaacccttggattactcagtttgtatgcaaattgttattcacatgtatacacatgcttatgttcttaaaggcagtgttgatgaagatcgatgcttttcattacatccagatggggacagtgtacaggtgagtgacagttcattcacgggggtaacccgggggcgtcagatctcaggtcccgccaactggcagggcttgagggaagtgtccatgtgcagatcacacgtctaccacttcctaccttgttcaggaatccgtgatgaggcctggtgcacgccagtgctgagggtttggctatggggctgccttctgtcacagaagtgagggttgccagggtttggaaaggcctcatccaatctttccttttgtctctatatctctgtcttcgtcagggtttcattgccgtgaagagacattatgaccaaggcaactcttataaggcaaacattacattggggctggcttacgtctcagaggtttactccgttattataacaggaagaatggcaacatgcaggcagacatggtgctggagaaggagcagcagaaagagactgtgtgccacattaggtagatcttgattgaatgagacctcaaagcccaccctcacagtgaaacatctccaccagtaaagccacaccttttaatagtgccagtccctaaggccaagcattcaaacccacgagtctctgagggccattcctcttcaaaccaatgtctgtttcttccctgacctcagggacatgcgtccctcctctttcagaggtgtcccacggtgcgcttgaagtcttcggcatatggctaggttttaggctttttattctacctactttcaactcttgcttgcttctacacaagtttttaaattactgggttcgttaagactcttagttgagtaactgaaaacgaacacaaactggcttaataataagaaaccacgttgctttactgactgctgtctaggaacaggtctgggtataggcatggctgactctgagcttgaaattgatattatcaaagctcacctctctttctcgtatgcgtgtctggtgttttcatttgtgttgatgtgtgtgtgtacgtgtgtatgtgcttgtatgtagaggtcagtatcaggtgactttctcagtcactctttatttttgagacagggtctccccctaaacttgaggctcaccactgtgactagactggttaggcagcaagcctcaggggtctgtctgtctctgcttccatagcactggcatgattataggcatgggctactgtgtccagtttatgctattgtctgttgttgttgttactgttattattattactatcattattattaaatgtgggttccggggggatcaacttcagtacctcatgcttgtgtggtaaggacttccctgactttctggcttggtgctcctctctggcttggtgctcctctctggcttagtgttcttaaccaacactagcttgcatcccccagcctcagctccagagagaagagatgcttcattccattagcaaagcgagtggacgagctggggaaaagtaagggccagcgtctgctccccattccccagactgcctgtctgtctcatgcgccttgcccgtctccttgccttctggaaatccccccttcctaaccccatcgatggcgcactgtgcctgtcctgcttcagcctcctggcctgaagtggccctgctccttcctaggtccatgtcaggccctcctcaccccgcccctattcctgttgtccccattgtttatgtgtgtaagtcccttgagttggcagagtgagtatccagggtgcagagtggtgtgcgcctttctcaggggccatcttcacttcttctttgcagcctgcgcatccatcagtggtcccagcaggctcctgatgctctggaagccttgctttctctgtcagatgggcagctccggagcctgctctgtgcagctggttgcagagtggcggtgtgcggggtgggcaggcaaaagtgcatttctccttcccctcggaactactcgagaataaatagcaggaagaaacctgcaaggttcactttcgatcccatttgagatctgctgtaggttacgcccttggacttgggtttcattcagctgaagcaatggcttccaagggcaaggtcagacctgtagggggttggtggaaggaggggcaagggagggaggccttagccctcagctcatggttcccgctcatacttttgcttgctttctttccttgtatggctctgtagatggctgctttgcaagagctgttctccaaggtcagtctagaatggcctgctttgctagcagcgtcttatctgattgctggagcacagagtgttcgtttgttctcagaaggcaagtcagtcaggcaaaatgtcattgaacgtaatggggtgcttttaaacctaatgtggggagtggagagaggaggatatcacatatcaaagtagacactcggtatcgggtttacatggtgtgtgcacctcagtatcgggtttacatggtgtgtgcacctcagtatcgggtttacgtggtgtgtgcacctcagtatcagaaggctttgtgtctgatcagcctgttagaactcctgctgtttaacttgcccctgtggaaggtagccaggtcctctgtggtttcctagttactggtctgtttctccagtgctcacggctagagaagggtagaagagcggccctctgggatgcgcaactccaggtgagcatgtggcaccgctcctcctggtgacagaggctggctatgcagaactggactcgtttgcaagttccaggggccagcagacggtgggtgtagagagagagggaggccggctctccatgtcacataacagttctctccctgcgctgtctgctgcctgccttgggtggggggtataatccactttgtcccctgtgttgagtgacttttcctgcctcagcactcgacataggggacagtaatggaggaagaggaacgagttaaaacaggaacaactgctcacatgtgtgaaacactccggcccagagcaagtccttgggaagccttccatcacagcgggctgaaagtgtagagaccctggatttcaatcctgacacattgctgcttgctgctttgctaactctgaggaagacacgtgacccttctgtgttcttctgtaggaagaacactgactcctaggacgggtgacaagcacttgagcgtccacatgtagccccctccttggcatgtcagaggtgtgatgtaggatgagttactgctgtaaatctcttttgtttgttgttgttttctgagacagtgcttttctgtgtagtcccggctgccctgcaactctgtagaccagactgtcctggaacccagaggtctgcttgcctctgcctcctgagtgctgggactaaaggctcccgccatcactgcttggcgtaaatctggagcctgttagtaacagaggccaaacagtaacatcccacccactggctacagctgctgctctggcatgtctcatggtgataacaagtctcctgccatagtggaaaaccccatcagtagatggaagcccagagtctttctctctgttgagcgtctgtattttttgcagaggcctcagtgttgtccctgatgaagaagtcatagacatgtatgaggggtcccacgtgcccttggagcagatgagtgacttctatggaaaggtaaggaaagccactggttcacctgaagcagccgtctttctcctctatttggtagttttgtggctgggaaacattttagggaggaaggactactttgacttctggttttagaggtcttggttctggggcatccaggtctatagtgagacagaacattcgttagaagggtgtggagggggaaacagggagcagagggagggagaaagagaagagtttggggcagggacacatctgcttcctgcggctgggccctccttcctggaagtcagctgtgagttagtcaggacgttactctcctgatgcagttaacagccttacgatccggtgactttacagtagcaccagcggtaagagccaagcctttagctcatgacattttggggaaggggcccttatagctgttgggctcgcctgctgtgtgtgattggtggaatcctgagattgggtctggagggattgtagatgtgagagattacagtgctgacgatccactgtgggctcttgcttgctgatgccccgttttctgtgatttctctctctctggtggatggtctttccattttctcttatctaccccatttgttgtcatccctgagcagatgtggccacgccttttggtctaagtcactaggggctgtcagaggagctgtatttcctgaggtgggctgaagcattctgagacctttgcctgggcctgacgccagcttttctcacctccgtgatctcctgagagggagtgggaagtgatcgtgagggcgaggggggggggggggagagcagagagggaaagaaggaaaggcacgagggagggagtatccatagaaagtcgcttccactgaggctcaggaacaagggagcatatcaccatctcactggtatgaggtccctctgtgcagaggaagccaagtgtgggttcctggaaacccctgacttcctggtagcctcctgctgattgtcacccggtgagccgggtctgcgcgtggctaagcctgccttccctctgcagagttctcatgggaacaccatgaagcagttcatggatatcttctcgctgcccgagatgaccctgctgtcctgtgtgaacgagcacttcctgaagaacaacattgactatgaacctgtgcacctgtacaaagacgtcaaggtgagggcagcgggcagcgggagttcagagaaagccagttgccatctaggggtgcgtgtgtgtgtgtgtgtgtgtgtgtgtgtgtgtgtgtgtgtgtgtgtggtggcaggagttcgggtagtcccgctctgggctcatttgtctctgtgattgacagtggcggtcataaagggacacatctgtttcagaatccgggacaatagaggcagcatgctctgtcacagatgtgccctctgtaacctggacttctctaatcctctggcagtcctgcctgccctcttacctgagcctgccgtgaggcggttatctccttcacacaggagaggccactgtccctgccccatctcctgtgaggcagaagtcacccagagagagcccccccccctttttttggttttttgagacagggtttctctgtatagccctggctgtcctggaactcacttgtagaccaggctggcctcgaactcagaaatccccctgcctctgcctcccgagtgctgggattaaaggtgtgctccaccacgcccggcaagagccccttttcagtacttaatttcaaacatgatcacacatctttatgggatacagtgtgctttggtgttcactgtatcccatcaagatgcccagggatgaggctggggggtagggcagggagaggttggttaatagggaaccttttttctcatatccacaaagatctgcctgtgtctgtatcctgagtgctgggattacaggcttgtactcccgtatctaccatagccacaatttcctttaattgaaaatatttttcaaacaatatattctgatcatgacttcccttcctcccaactcctcccatattcttcctccccacccccaaactcctccttttttcctctctttagaggctaacaacaaaagaaaagagttaaacaaaaatagaagaaacacacacacatagctgaattccataagaacatgagaccagaaatcataatttacagataaaagaccagttaagacaaaacatgcccgaataaagcaatgagacaaaagtctacagcaatcccaccattgagttcattttgcattgtccatccacttctatgttagggtctacacatgtgggtgatatagccagtgagactcattcagcaggagacaactaattaaaatagttatatatttttaaagatacatatttctttttaaaaattttttttaaagattaatttatttattttatgtatgtagggcatcagatcccattacagatggttgtgaggtactttgtggttgctgggatttgaactcaggacctctggaagaacagtcagcacttgtaaccactgagccatctctcaggctcccaaagatacatgtttctataccaaaatattgtataccaatggccagtgtacattttgttgttttaattttttgagacagggaccctccctctgtgtagccctggctatcctggaatttgatatgtagatcaggctggccttgaactcacagagagtgcttctacctcctgagtgctaggattaaaggctagcaccactatgcctagctctgtgtatgtgtgtgtgtgtgtgtgtgggagggcgtgttttgtctacgtgtgtgtctgtgtactgtgtgtgtgcctggtgcctgagtctgttgtgggctaccacatggttgttaattaaacccaggccctctggaagagcagtcagggctcttaaccattgagccgtcttttgagttccctcatccaatggaaatttttactgtcctgatttcagggttttggagttgagggcgctctgtactttctcagcattgctttgataaaaattgggctaagtttcaatatttagtttttagctctccttttgtacacacagacactatatttaagactcacttgcagcagaggagagacgtttatgtgaaggttcagcgcttcctctaaggattgcgtatgttccagattctggtctgacgtggtttcttttggtttgtttttgacagccaaataatctttattaattttttccaaaagcactttaaggatttaatgtattccagagttttgcattagattgatacagagaacagaacatagtctttctccattaagaactaggtacgaaaatcagtactttatcataaattctttcttttcattaattattttttctttttttagaattaatttattttttgtactccatattccattcccttgcccccattctgacggttttgtgtgtactcttcaagcctttgccttgatgctgatggtaattcgttaccccagtttaaagacactgagcacagaaagcgtgactgccttgcccaacagcacacagcagggcctggattcttaatccattcttggcttgcgtgtaagcactcactgccttgtgtgttggataaagctgcagtggctgtgtgctgatggtaactgagatgatgtttatggcccagagtggtccactccgcagaaatccactgacaagacttaggactctgctcctggtaccagaaaggttcctggcactccaggaatctaaaatggtccgctagacatcccccaccctggaagcagagctctgcagtgacgtctggtgacaccattctggcacagccctcaagcctgcaatggactttctgtctccccctctttcctgcctctggcagttggcctgttgcagaatcaagagaggaggcgactttgtccccctgcctttgcctttgcctggccttacagaactgtttgcaaacagagatgaggaaggaagggcatgagggtggagggtggagggcggggacccccttcatgcaggttgtctgccctctgttgaccatcctgcatgtaaactgctctttgtcatgtgagacctcattcagacttacacaaacgaccttttcaaaggaggcgcttggaaattgtattggcaacagcctctgtcactgtggaaacacagtgttccctagaggcttcctgggctaagtgggctagtgttgggatgtgtagacagtggactggcaggaagtgagccccgaagctgtgccggtggcactaactccagctccctcagcgtttcactgatgacgaatctgccttttcacaggactccataagggatgtccacatcaaagggataatgtaccgagcaatcgaagcggatattggtatgtatgacagcattctctgtgttggtatgtgggtatttaaacatctcaccccgggggctgagcagggaccacaggcgtttcctgagggttgttaaaggcccctgatcctggcagtgtagatgtctgctttctgttctagaacttggtgtctgtcagtctaagaagggatggcagctgtaccatatgatccttcccttcaatggggtgtgggggtgggaggggtggtctcttgtttcctgtgccctgggcattcacatacttttcagaatcaaccttcccgggaccagagtttccccactgtgcctaggacactgcttaccccaggtgcccatctcgtaagtacctgcagaggacctgattccatcctgagtgtgtgaatgtctttctcatccatagaaaagtacatctgttatgctgatcagacccgtgcagtgttggctaaactggctgcccacggcaagaagatgttcctcattaccaatagcccaagtagctttgtgtaagttctgtcttccctcaccagctggtggctcgtgggtcaagtgccattcgtcttagtagctggaaagaaatagtttgcaagaaaataaaaacagttcatccctttgatgtcagctcacctggctgccttgttccagagacaaagggatgcggtacatcgtggggaaggactggcgagacctgttcgatgtggtcatagttcaggccgagaaacccaacttcttcaatgacaagcggaggtgagggccgatctattggggcacttgactgtacttgtgaacacaggcatagcatgtcatagtgagagccagtcacaggatcacaagcatcggagatgtgtagcctgtctaacacttaacttcaggaacagcgggatgggcacatagcagacagtgttctcagttgagtgtgggctgctgcagttctgagtcaggctttagaaactgagactacaatggagaacaaggattaataccacacagcaaagtaggcatgggctccgggtgcctcggggggtgtaaggaacaccaccaatgccagactgcctggtggcagctcttagaacagctaattggtgcatttcaaattgcagttggattttgcagagttctctgcatcccagtacacgtctcagccgtgtcttatataaggtcctcctgcctctggagttttgggaagggggagggaagaggtcaggaccagtgcaagagtattaaagtgtcctctcccctgggttcagactaggtggccaactcctagaggcccacatagttgaagatccttactatagatagcattctaggaattgctctgtctgtctatggctcagtttgggaagggttttcccaaaccttccccgatctgtagctggtgacctagatctgtgggtagttccagggatcctaatgcgcctgtgtctgaagttagggcagcatgtgtaccattggggtgctaagttctcagagtcaccgtgactctgggaggaagaggcaagctcaagacccaagcatagagaaagagactgagtcttgagtgtggtcagaagctacacgctggccatgttgcctctagcgccctcaccaagttcctgcaaagcctgggcctccctttacccagactcttctgaacggtttatccgaggtggaggggtcgggcctgggctcttcctgggagggactcagcctagcactggttcctccccacttcttttttctggatgtttggaacattggctgagacattccctttcctctgttgtttattgaagccaacagttgaggatggctcattactcagaacatccatgtgagggaatgttacacagccactaaagatgccaaacttggctataagcaaaagtcgccagcatatcttactgctaatgtgtttcagactacgatgtcacaggagaggctgctgacaggatcaaaggaagagagatataaataaaagtgtacaaaatgatcttcatgttcctcagaaaagggaaagtgggttctgatacctacagtgagtttctatttctgtgattggagaaacaaccccaaaagatgctctgagtccctctggctatgccctggggtgagggactggacggctctgctcccagcctatcagagctactgctcctgcctctacctggcatttgacccaggatgccagagttcctcccataatgtctgcaggcagcagtgttcctgcagtcttcgccctgggaagcagattcttgctgccctgccagatgtcttagggcagcaggtcgtgacctttcacacagagtcacatatcagatatctactttaagattcataacagtaacaaaataacagttatgaagtagcgataaaaaggattttatggttgagagtcactacagtattaaagagtagcagcagcattaggaaggttgaggactgcggtccttgggaaacctgactaaagggcttgtgcttgccaggggtggttggcccttaggattatttttttcttgttttcctgtgtgtagtgggtctgtaatggggcctgcatagtgtggaatggggtgacctgggccaggggatgcagtgtggctgtatagtgtggaatggggagggtgacctgggccaggggatgcagtgtggctgtgtcgtgtgggatggggagggtgacctgggccaggggatgcagtggggtttggagttcaagagctagatcctttctgctctcagtgactccccacttagtatcttgggcagcagagagctctcactgttaccatctattcttgtaacatttcccttttctgttgctaggcctttccgaaaggtgaatgagaaaggtgtcctactctgggataaaatccacaagctgcagaaaggccagatttacaagcaggtatccacgccttccccagtgtcttcctgttgctttgctttgtggtcccaggttgtgggtactgggactggccaggtgcttggaacagctggaccccttgactgacagattataacttcagagtaactcaaagctgactgttaaaaaatataaatatcatttaaaacattactctctataaaatgtaaagtgtcaatagtaaacctcagagatgtctctttgaggagcattaatcttggtttattattcatccaatgtatttccagatgagaaagatttcatgtgcagttttaaatacctgggcatggaataaggctgtcaggagctagaaccatggctggtcattttaatgatgccagagctgttttcttgactgaacattcttggtgggtttgtaatggcctgctggatttagcagtgagtgtattctctaagccataaaaaattagttttaattcagacattttacttctaacaagtcggaagatttagacgtgactcagaactttctgcgagactgtttacaaaataggtgacgctgtgaatgttcaccatcagggaactggcaggagaaatcaactgtgttaattataataaaattagaaggcatttgtatagaataacgatctcggcatgtttagttagtgtagagataagtgcagaggggcttatgtaatctgaactgttctttttgttgtttttgagactgtctcactatgtcgtccttgccagcctggaatacgtagatcaggctggccttgaactcacagagatcctccgcctgactctgcctcctgaatgcagggattaaagtcgaacaccatcagcatgcctgacagtgacatttttttcagagtacatttggcatcaaagaaaagtctgaaagatttttccaagagtgtgcttttagctttatttgttgatatttaaaataaaccataagagttaaaaacaattttccaagttttaaagcaggtatcgtagactgtaggctcctgagtttctgacctgtaattgatctgcacccctcttctgttgcagggcaatttgtatgaatttttgaagctcactggatggagaggatccaaagtactgtattttggtgaccacatctacagcgatctggcggtgaggagcccttttccccagtggggggcgctgttttttagaaactcagagtggctcacggttttgaaagtctcccttttacaaaacaggagacattagagttgtgaaaaaatagttttgtttttctctttgagatgatggaaattagaaatgtattcaaagatttagtcagaaacatttcaatagaactattgaaagcactatgatacgctaaatgccagggggctttctttcccttttatcaatgtcagaaaacttccggagtgtgcccgaatgctcccagcttcttagcctggtcctggtgggtgtgccccagaggtctggggagtgctgcagtatttattgaataaaggatattccctacacatgtgtaatgctagggttgaggccaggacctattgcagccaggcagatgctgtaccgctgctctcctttcctggtcctcttataagtctgcttctcatggaaaacttgacctaggattccaggggcccctcactcagtttgaatgaggaccattcagagcatttgagttgagcctgaccctgatctcacagaccatgttgtgttttgtttttccccacagaccgtgtttagtggttccaatcccccctcccccatacctctccctccccctttctgaagcagctgtgaatcacagccattatttccagaacaggaactttctctgggtgacatggtcaaagcccggggccagtttggttctaattaagtgtaattcatcgaattcaacttggttaatgactgaccattacaatgagggagtgattgagtagctccctccctggtctgggaaaggtagcacggtgttgagttccgcggggactgagggagcgcctgccctgtgatttctgtgtcaggatctgaccctcaagcacggctggcgcactggagcgatcatccccgagctccgttccgagctcaggatcatgaacacggagcagtacatccagaccatgacctggctgcagaccttgacggggctcctggagcagatgcaggttggctgtggttcttgttttgttttctctcatttttttcccctttaagcctgaagataattgcggatcaaaagatgtcctgagttttgtgtgtaattatgaagtgtaaggtttaagttgttctcagcagagtgtagatctgcccgtggttattttgtttgtttgtcctttctccttgatgggacccttaagaatgttcctgagagccatcaagagcttctgcagagtcttaaaggtggacgctatttttgtgctattgttggtgaaaattggctcattgggccccactgttatgcttgtccgccctccttgcctttagattaccagaggactttcctgcactggcctcattttccccagaaggatcttttggaatgcgatcctaggtaccaaagagtcgcagagccagctgagatcctgggtcagcctctagtggcaatgtgatcagtgattagctgttttctcaacttcagtgataattcatgcagccagcatggggcggttaagacaggagcatttgttaggctcacttcttaggccaggatgtcgcccctctcaatacctgtgacagctgttcagctgttcccaccccatctcatgagtcacctgtattctctctttattctgccctacctaccatgctgtgcgagtgagtcaagactttagattgagtggtacagacagtcactcttggctggcacacctgcagctctggtcatggccagctgcccacagcttctcctgccaagctttgaggagaggcagggcaggccaggccaggccaagtcctctctcccagggtatacattccagcacatggggccccgcacgtcctccaggttgggttctggtaggctctcgagaccttggctcttgactcttctgacaagagggtttgttttgccttctttactgtgtgtgctgtgagatgattttctaaaaataccggatgtcaagtctgggctaatgcagctgagcctgtgtccgtgtcacatgctggcgtggtggtggtagctgttccttctgtggccgccattgtgccaaaggcttgcgcagtgcacagcagtcccttggtgctggcagctgtcctgtgtgcaggtgcaaccttgccatctgagaaccaggctgcagggttttgagagcataaaatgatgtagagaggttcaactttaggctgtgtgatgcctaagtctgggctttgctgcgccacttggaagtgcttgctcccttaggggttgtcaggcggagctgagcgtctgtgatagtcttacgtatgggctctctttctgtgttttgagttaagctgcctatggttaagtagtccagaaataggaaaggggaaaatttggaaccaaacaatttgtaagttggaagtaatatttacagaatattgttaaagctcctgctttattattaggtattgattccttattttgtgtcttatttataaatcgatctttggtataggtatgcacagataagaaaaacagtgtatatatagggtttgatggtgcccacgattttaggttataagggtttggggacgtgccctgaggataaggaaggtggcttctgcctgacctgcaccctttctgtgactgtgcatctgatcagactcacaagtgacctgcatgtcatggctgtagtgaccgagtggcacatggctctggaaacaggttttgtttattttcctttctggcctatggaaaatgcttgatggctaagagaataggtagccttggttaagagaatgggtagccttgacaatatttctgtgacatatggaatgaattacacaagacttggttagggaagtaagaaaggggaaatagcacgtatatttctaccctggttttataggagagaaaactgaggctgagagagaaagtaacttttcattatagagtagtctgtagtatgaagccatgtagctgtgaagtctgactgactgaaggttagacccttgtgctcatttcctcctctcggctctctgggacaagcctgagatcacagcctgcacatgtccatccagagattccctgagcccagtagagaaatccctgatgctggcctcactctggtgttcggccctctggtcttcacctgcctggtcccctcaagctctggtgcattgacgccctcattggtaccacatttcaaggggtgggctgtcagatgagtgtcttttctcactgcccggccctcagcaccacagccccagtctggaaaattccattatctagagcgctcctgtggtggttagtttcagagaatgtatcccattattaagaaaacatgtcctgggagattgggtttaatttgaggaagagcagcagagtcatttggagttaagcctgacgagttacgcagaagagtagaagtctctccttggtcgtgaagtacgtttaaaatgggtgtggctgctgctaggagagctggtgacttgtgggcctttgcaggaggccgctcagaccgcatacgggcggcaaatttctttaaaggccaggaagcggatattatagggtgtgtgggctctggactatgtcataagcactcagtgtttctcagtacagccattaagtaataataaatatttctaggcagtggtggtgcatgccttttatcctagcacttaagaggcagaggcagaggctggtgggtttctgtgagttcgaggccagcttggtatacagaatgagttccagaataaccaaagctacccagagaaacccaaacccaagaccaaaccaacaccaacatcaacaccaactgaacaaaaagtactattgtgactaataacttagacccaagtactttaaataggcttgatacttgaggattgtttgacagtgtcccttgtagagaagggatggcacacgagggtaggttttctctcatggggacaagcacatttgatgctggtgccgtgggttctggtgaggagattgctggtgcgatgcagtgatggagaaagccctggagggtaggtgttagggtgtcagagccaggcccaggaagagctctctcaggacaggcacagagcagggtggccctgccctgggaaagctgctctgtatttgctcggtcgtctgtggtcacggtccactgggtcccaccatcgtccttgggcgccctctaacttcaggaccagggcttacctgttcagtggatgaagatgccaagtgtggtgtcctaagttcagtactgggattctcaaaagagaatccatcctgcagtttgcctctgacctcttgtctcctcatgctgacacatacatgccctctccccaagtaaataaagtgtacaagaaaaacaaaaaacttaagagagtcaggactggtggtagagaagcagaggcagctgacacgcggtctcccccatctctggcaatgctgacctggagaatggttcttggacttggaacttgaacttggatcttccagtcggctctttccatctacagagcctgcgctgggttcacctgagggctgggagtgcagaggagaatttgcatggcttctggcagctactctgagaaagagattagttttggcacttcggcaggctagtcaccaccctggagacttccctcttgcaggtgtggctctgtctcattcacaccaggctgctgtcagtctgtcatagaccagtggcttaagtaccacctgcttcctgcagttccccgactgaggtgccagctgtcactgttggtaagatctggcctcgtatggtagagaggttggagaattctgaggtctcctttatcaggccgtggatctcattggtaagagcagtcccactcaaggagttaattacccccctaaggccagaccttctaagaccatgccttggaggtaagcatttctgcttaggaatgtcagagatataagcaccctatctctagtgagcgagctccttcctgcttatgtgaggtcccaggggcctagtttatggactaggatggagtggtggccagaggtgaggctgaagattgggttgtcccggggttttctgtggcctgttcccacaatggctgccctctttttgcctgttgtgtcttcagtatctggcacagggaaacctggaattcagtgggcactgaatgaacacaggcacacatgcatgcacacatgctcaagcacacacacacacacacacacacacacacacacacacacacacatctcttccccttccccatattttgcatgtctagaagttccttgaggtaccctatggattttagctctagagtctgtggtgggtaatttgttaatgtaaaatgtggacaccagggctgtagagatggttcaggagttaagagcactggctgttcttgcagaggtctcaggttaattcctagcacccacatgacatctgtaattatagtccctgggtatctgatgccctcttctggtcaccataggcactacatgcatgtgataggcacagacatactgcaggcaaaacacccatgcacgtataaaataaatgtgaaccctaactaaaaacatgtctacagaacccctctcagagctcacagtggtgcaagctcagggccctggtgctgcagtagagcacagataggatattgtcagtgtcagctacgtcctgggtggtgacagataccaggcaagaaatccaagtcttgggctcagccgcgacaggttttgtctggctgactattgagctgggcagcagatctttgactgtcagatgggaagcacgtggtctgttgtatagtcttgtcctcttgagtcctaagattgcctaaggtggtgaattgaggcagcaccatgtgtcccctgcagttgtaagtccctgactctggttgtttgtgtgccacataatggcttgtagggtcctgtccatcaaatttttttccatctgcttacattttgactcctcagaaagtcatatttcccttccattgaagctaaagtaacattaagggatatagaaactaagactgttcctctcctgtctcgaattagtttaaaacatgctcattcagtgctcatttccagctgtcatgggcttagctagaatctgtgggtgtactgccacgcccaccacgcccaccacccccttcttgcccatttctcaaccattgcaatcttattcagggaggagaggcagtaggtatcatgaaatgtatatttagaaagaacaacactatcaaccaaccagacccccacagagctcccagggactaaaccactgaccaaagtgtacacatgggagggcccatagctccagctgcatatgtagcagaggatggccttgtcgggcatcaatgggagaagaggcacttggtcctgtgaaggcttgatgccccagtgtagagtaattcgagggcagggaggtgggagtaggtaagtgggtgggggaacaccctcattgaagcaggggggatgggataggggctgggggggcgactggggaaggggataacatttgaaatgtaaataaagaaaacagccaataaaaaatagatgtaatgggcacatcacatttcatatgtgtatgtaatgtgtttatatataacatttaataagtttcatgtcttcataattttctatttttcttgattaagctacacttgtcttagagtggtgtatgtgcacgatagtgttcgcacacctcctcatttgtgtgaggtcagaggatatcttgcgggaggtggtttttttctttcaacagggaagagctcagatcaacagccttggtggcaggtgcctctgtctgctgcaccctcactccagccctatgctggctgtcttgttagggtttctatttcttcaacaaaacaccatgaccaaaaaacaagttgaggggagggtttatttggcttgtgcatccaagtcgctgttcattacccaaagaaatcaggacaggaactcaagcagagcaggaacctggaggcaggagctgatgcagaggccacggaggggagctgcttcctgacttgctcctcatggcttactcagcctgctttattatagaacccaggaccaccagcccagggatggctccacccaccatgacctgggccctcccccatccatcactaattaagaaaatgccttagagctggatcttatgcattttctcagtcaaggttccctcttttcagatgactttagtttgtgtgtcaggctgacataagagcagcccacgccttaggtttccagtactggacagctggatcttctctgtgtgtcaacaagccaggctttcactggggaaagtgggtacttcacacaagtgcccaactgttagacttaaggaggaggaaggattccttcatgaaaagtttcccattaaataactcttactgctaacgagtgtgtttgaaagcagagccctggaaactgttggcttatgtccctgcaggtccacagagacgccgagtcacagctggttttacaggagtggaaaaaggagaggaaggagatgaggtgagcctgtcctatttatcacctgccgatacccatccggcccttggtgtgtgctgtgcatccgaggagacttcaggaagcatcctattttagctccagagtgtgaccgtgacttcccagtatccaggatcagttctctgctgatggtgatgtgtggtgtttcttcaaagccagctgcgatctccatctgtcctctgcctttgccattgaaagccttttaagaggtggctttttggtgtttttcctccggcctgactagcagcccaatggtagctggctgttgggacagtgctggaggctgtctctgaacacacagggatcctcagggctcctgcagtctagttatgctccctgctgtttcaggaatgtgcccccagcttttcttggtgaagaaagcctttggcttgtcagaattgtcatcagtgtgtccttagggagacagttgcccacagggagccttcctgtgatggatactcacactgtctgtgaaccgaatgtggttgctcccgccctggcatagcctgagatttagaaactggttgtttctggggttcgggtccctgaatgacggcagccagagttgacaagggatgttgaggggttctgcggggccgagcctgggtcgagtctcttcctcagaccgttgggcagcccaggcttcttctgaactgatttgttttgctgtaaaaatgtggagtggaggagagtgggaaagggggtggtgtggtttgacttcagggccgctgtctctgaaggcctgggctctgtctgcagtgaatgggtcactcacttctagggacctaacatgctcattgaggaagcttcacctgacagagatttcctattggcttcatgtctctaacatcgccacatcttttttttaatgagtaggagtgctttgcttatgtgcatatgtgcaagtctgaatctcgtgcttgccttatggccatgggggtcagaagaagacatcaggccccctgggtattatggacagttgtgagctgccacatgggtgctgggagttgaacctgggtccactgtaagaggacatcagatcccttggaactggagtaatagacagttgtggactgccatgtggcacttgtaatcacacccaggccctctggaagaacaaaaagtgttcttaaccacagaaccacctatccagcccctgtaagctttcgtttcaacgtcttaaagaggtgttgcagtgaacatttaaataccatttatgttgtttacctgcagcgacctagctggggttttaacagctgtgatcgtattagtcgtcagtgacaacagacaactgctattagtatgtgacttttatgcaccgtgtgcaacaagttaagcgtttcccatgttagtaaggaatctaacaccgtttaaatggtattaatccattttgctggagtaggctgtgtggaggatgttgataggaatgcacagaggtttaactgaagaggggaaacaccgtggctttggtgactgactgactgaagatgctgcaggctaggctaggagggggcgtgcgaagcatttgaaggtctgtccttggaggtggagatcaacacaataattgtaattcctccaggagagaatgctttacagcattttatttctgtgccttgcttagttcttggcaccatggagaactctttgtctcagtagctctgaagcagctctgcccactctgatgcgcgtaattcatggtgcaaccttgaagtagcatcttaactgatacagagccagggatgtaaaacaggctattttgagagctggctggacagatggtgttttgtggtttgtttatttgttttgtaagacagggtctcattgcttagcccaggctagcttcctaatcgtctaacctcagccctctggtgttaaggttacaggcatgggcctcatatctctgtagcccaggctggctgcctgatttgacctcaggggtgtgtgggccccatacctgacttacaggtttttcctgactggtattaggtctgcccgtggctagttggctgctttttctttccagtcggttttgttttaaagatatttttactcaagttttgttttttctttcaaaaaacaaaaacaaaaacaaaaaaacaaaacctttaaaaacttctctctgtgctttctttttccttcatgatatttcagagaaatgaccaaaagtttcttcaacgcccagtttgggagcttgttccgaacagaccagaatccaacctacttcctgaggcggctgtcgaggttcgctgacatctacatggcgtctctgagctgccttctgaactacgacgtccaccacacattctaccccaggaggactcctctgcaacatgagctccctgcatggtcggacagcccgtctgccttcaaagcccctttgctgcaggaggctcaggccaagtagtcctgtgtttgcctgaggcaaaagccagaagcattcgtggcctcacagagggtcaggcagcctcagagttgcttcccagagtcagatgcgccttttgtattttttctatcttactatgaatactgtcctgtccaggttgaggcaggagctggccgcctggggcctcccggcccttctccacacaacagtgttgaaaccctgatgagaccttgcttatagtggaaccagcaacgtgggcctcttgatgagtgagacctcttgatggcttctgacaagtgagacctcttgatggctgcctgtgttccgtaggtggagagtggacacttcttgattctgtgagacatttcttggttgtttacaagcagcactggggaccgcaagggcgtggtgatctgcagcacaccaggaagcaggttcctgagggagcagccctacctgtggccagttcccccatctcctggtcctaggctttcaaggacattttcccataaaattcacagcctcctggaatgactttgttgagggaaaacaggaagcatttgtcacagtggctttgtctgccccaaaggggtgatgggtgggctccctcctccctaggaaaagtgggagaagacagccactcgcactaaaattgcctttcagccagtgttttggacattatagaagacaagaaagactcagcctgtggccagggctagcctgtgtgttagacatccagcacagacagctcgctgtgggaatgccacatttcatgctgagagccaagctggggaaattgcttctgtccttccccctctggagggatgaatccttgattacatctgattgtagtagctttgaacacttttgctgcttaggcaccacaggactggctgctctgttatcaacagttctgtttaatggcgttttcgttgcagacgccacgttcattgcaaatgccacgaaagtgctcgtggccagattagccttgtcacctggcctgactcattttgtgctcttgtggcgctgctgctgctgcttctgctccccccccccccccccgagtccccccaggtagggtcttgctttggagcctgggctggccttggactcaatcctccggcctcagcctcctgcaactgtgtgtgtgtgcatgcatgcagaagtgtaaagaaaggcaggaccatgacggagacttgtggcgagcgcttgcgctctggcatcttaacccgcaatgagtagatcttaaccagctgttgagggctgctcccttggccggttgctgactgcctggcaatgtgcagaagctaacggagctgtgcagcattcactgtaatgctgtgtgttagcatgggatctttgatgttggtagtgtttaacattgttgtcaaggtgacccttcagtctcccttcccccttcttgtgttctaaacacgggggttcagtattctgctcctttttagaatgagatgggcatttttctgttcctgtgttcccgttccccagtgttagccatcgggggttttggcagctgctcagtgtcagggtcctaaaaggatgcatgctgcccggatgccctaagccctaacttgtgcttgtaggaggaatctttggtcgaattgtctactcttctggtgtggacagtttcgagggtttatttactcaagattgaggtagcgatgttttcttatgcctacagtaggcgacctgagccttgggggaggaagacatctcctgggtttgagaagtgaatcttacagcctattcctgtctggaggatcacagtcccgaggtctccaagcgtggcagtactgggatcagcgaggctgtcgcaccagacatgcaaactgtgatctggctgcatggctggcacggcatccctgcaggaagaatggggcgttttccctgttactgtcctcatctagtgtagccaggacaagttttagcttgtccctgggactcttggctggggtctgacctgctgcgctgtggtattttcttctttctagagtattctagagtatttctagagtatttttgtacacgttgagggcagtacaaggggaggtgggtctttttttcacctttaaaaaaatcaaattgtaggccgggtgtggtggcgcacgcctttaatcccagcactcgggaggcagaggcaggcggatttctgagttcaaggccagcctggtctacaaagtgagttccaggatagccagagctatacagagaaaccctgtctcggaaaaaaaaaatcaaactgtaaaccgaacagtaaaattatttttaatatctttaatttgtagggttttgtttttttgacattgcttagactgattttcttagaatcatgtgaacaacaattcagtctaagggcaatctctgccagtctgatgtccagcaaggtcatggtgccatcaggggccactggagtagtttgcactgcttggggtttctcagttggtttttcaggggagagctggctttaaaaatatctcaggttctgagtatttaaagctcttgattttcctcctaagatagcacaccctcccctccnnnnnnnnnnnnnnnnnnnnnnnnnnnnnnnnnnnnnnnnnnnnnnnnnnnnnnnnnnnnnnnnntgtccattcctccccttctctcctcctccctgtttctctcctccttccccctcccttcctctcctctcctcctttggctgtctacccatgtctgtctctgtcgtgctccccacttcaccattagtacacctgctgctgatttggtcagatcccagactaaattataggttgctttgaacacatcagccctctcatttattgcaatgagggagaagtgaaaagctctcgtgccatctacctaatttagctttgggtgaactaaatggctttcccctcccttcggcaagtgctaaacactacagttccactttatccaaatgctcacttgctgccaaaaccctacttgggggctcttgactaaaatgctcaagagactacatttggccagctgcagagctccttggtggttttcttcagctgcttagggagccgatccattctttccctcctgaggaccttcttttgtttgttagtttgggacagggtctcagtgtgtagctctggctggtctagaagttactatgttgagtgggttggcctcaaacttatagagatctgcttgcctctgcccccacagtgtgttgggataagaggagcataccacccggcctggcatgatttcctttcattgggtggatttttttctctctcctttatttccttgttatttatttatttgtggttttggccttaatatttgtgagctaggttcttgagttcagctaacattttagaccacggattggttaagcaaagggaaggaagaggagggggcccttttctaataagggaaccattttcagctttgcaggccattctggttgccgcttctgtaggaatagacacactgttccattgggatttgattcatcagcacagggtgtggcttgctgcctcaggctgggatggcaagattctctgcttagagccagtggagcagccttccagtttggatagttagtgtgaggtctaagccagcgtgctgtgtccccttagctgccctgtctaccatgtgtatctgtttctgcacggccagcgctaagctgagattgcttcactgtgtggatttaagctacgagttgttgccccttttcgttactctgctggacccaggactgaaggccggctcatcccaggggctggagtgtggccggctgatgggtttctctgccttgccccagatcacatgcctttcctgggggtgtatattccatgactgttccctgtgaagggtcgagagcctggtctctccaacactactttggggacagctccagagctccctttggggctcctaagaccttcctgtgcttgccctgcaacaactggtcttcccctcccaggtgtccatcccagcagtgtccctcagaaggccttcctgcatgacacttttgtctccagtctgctcctccaaaagtgcccctgtattctcctgttagcacaggctagagctccaatgtaggcccatttcctcactgtttcgtgtcgtgggatgactgtgcctgtgtggtatcaggcacaataaatacaaagtaggtttactatttattcggaatgtgaatttgctatttattctacgtgttgattgtctatgttgtgataatgaacttaaagccaaataaaagcttgagttgtatctcctggtatgtgtgttagacctatcggtttatgggtatttaagccagttgcaaaacatggttttccccccagatgtgagaccatttctatgaaaataaatcaaaggttaaaaaaaaaaatcctagggttgggagcacagcttagtggtagagtgcttacccagcatgctttgaggccctgagttcaattcccagctcctccaaagaaggaagtgagtggacccacagaaggggattgagaaagggtgaaatgtagatggtttctgggctttaggactaagttataaatagaaactgtgtgagctttccttgggcaggtggtggctggcaggcatacacagtgtgtggtgatgttgggggagttggggtggggtacactgtcttgtgggacatactgaggaaatacagaattgaggaatattcagaaaatttgctactgggcttggatgagtttataaatattgaaggccttaccttaatatattttaagcgtgtgtgtatagacttggcatctgtgggcacgccaccgtgcccttgctgtgctgaacagaccctcattcatgtctcctgtgagtgtcgtgttcccagtgtgctcacttctatttgtgttgggatgatggatgccacagagcctctagctagtctgtcctacatttgttgtttgggggatggagttcctggagatgtgccactgttccttcgtggtgtgatgtccctctctagtgaactgtggtagcttcagccttggtatcctggggctgagagagagagcttacaagacattttatggctcccagaactttagatagacttgactcggcaaatctttaatgggatgggatgaatagatttggggtgtacaggcaaaagggggggaagtctgaggtctgttcaacctgggctttcaccctgtgcctaccccatagcgactccatcctgctgacactgtgccctctgataactggagaatgagccagtaggttggttggtttggagggtgcgtgggtgttacagaggtggctgctgaagcttgctgagttgtgagccaagtgtccatagcgaggaaggaccagaagttgacggtatgttgttgaaatctttatcccaaatacacagatgccagtttgcaggccctgggcttgggggagacaacactcagttctgtcccagtcctagcaagtcctgccaccgaggctgctcggtctctctggatctctgctgcttatctgcaaaagtcactggactggtggttttaaagcctctttattcccttcccaattctctaatctcaagattttaaaatttattttatctatctatctatctatctatctatctatctatctatctatctatctatctatctatctatcttggtaagcctgggtatctatctatctatctatcttggtaagcctgggcatggcagctgaaacacatgatcccagcatgctggggctcaaacaggggaatctagactttaaggctagcctgggctatgcaggaaggacagggaaggaagtagagggggtgagggaagagcagcatggtatggccagataacacttcattttctaatggtacagggtacactgttgcacatagcaacacagcatctttcaggggtgtgttgcatggatacaccacagctcagtcacatagcaacacagcatctttcagaggtgtgttgcatggatacactacagctcagtcacatagcaacacagcatctttcaggggtgtgttgcatggatacaccacagctcagtcacatagcaacactgcatctttcagaggtgtgttgcatggatacactacagctcagtcacatagcaacactgcatctttcaggggtgtgttgcatggatataccacagctcagtcacatagcaacacagcatctttcaggggtgtgttgcatggatacaccacagctcagtcacatagcaacactgcatctttcagaggtgtgttgcatggatacaccacagctcagtcacatagcaacacagcatctttcaggggtgtgttgcatggatacaccacagctcagtcacatagcaacactgcatctttcagaggtgtgttgcatggatacactacagctcagtcacatagcaacacagcatctttcaggggtgtgttgcatggatacaccacagctccttcatgccagatgatggacattggtgttctgccttttgactgttatgaacaatgtcaccatgagtacatgtaagcctacaggtgttcagtcttcttgggtatgcaccaatgagagacagtcctgggttctgtggcaatccactggactgtctgaggggctgaggctttcccacagtacctccactagacattttccacagtaaggcccgagagtcctggctccccacaccccagcaaagcttgtcttctgatggaccatttgaccagcgctctagtgggtgtggagtctcatttgtgtaaagtaaatgcagggaagcaaaatcaagtaactgctaggatgaatgttggctaattggaagggctctaattagccttgtatattaagtatattttgctttcttcttttttttatttttatttttattttttttaatttgggtttttgttttgttttgttttgttttgtttttttgagacagagtttctctgtgtattcctggctgtcctggaacaaactcagtagaccagactggccttgaactcagaaatctgcctgcttctgccccaagtgctgggattaaaggggtgtgccaccactgcccgtcgtattttgctttcatagtttgacaccttctaggtacacagtgactttttctgttctcacatttattgagcgcacccgtgtggcaggtacttctgggtactggaatacagaacatatgggatgaagccttgcctttggtgcttacagttaataggagataccacagggtcacagctacccacagatagggcagaacaggccaagcaccatctggaaggtgcagagagccacagtgaaggcccagaggaggcagaggtatactggtgtcctggaaacatgtccccttacccatgacgacaaccccagactaaccagaggggtgaggtatggcttctgagttatcatactttaaaacaaatgatccaagtgacagctggagcaggggagtcaccgtgtaaccgtgatggctcagggctcacgtggctgtggctgttggctggcttctcacatcaggacctcagtgccccaagagggtcactgttctccagctcccgttctccagagtcctggaagaaagaaggcagtggtgctagggttaggatgcctctcctgcatccctccagggagaacactgctctgctctggggcctcactgaacctttgctcatggtgctgcttcagacagggggtgggtgggcctaaagcatgtgtggtcactggagccttccctcatactgctgcctcacgtgagagctggcggtgggggtgggttaggtgctggctagggctgcttatgctgggcccatatatgcttgaagttttgctgcttgaagttgcctgtgtgcttctcaatattgcttccctgtctctatcagtactataggaatacttaggtcccaaggaaggtgtgagggttggccatttaacacttagccactggtgattaatagagttatagacactccttcatactgaagatactgaagcatgatgactgcaagcctttgagatgctgaactcaggacaccctactccctgccagagtgctgccattagcgttgacaagcagcattggttagcagaggtttctgtttgggatgtacggagatgggcaggtataaaaggcagagagtgtagcctgttggtgtcctgggctcaggagtcctggaacttgagcctttgggccactggttctgactgagttgaactgaatcctgcctctagaaatgctgtccctttgctttgggtgactctgtcatgcttaaagctgaaggtgcccttaaggcaaaatatggggaggtaaggaggttaagccgtgatgtgtttatttttcaaccttctgtgaaggtaattctgttggctaccacacatacgaatccccacagggtgtggactcggggtttgcagctattgcagtaaagcgtcttaaagtgttttgtaagaaagctttgtagtgttttagtgacaacctgtaaaaattgaactacacagccagctatggtgacacacaccacttatcccagcacttgagagaaggtgagtctctgagttctggaaaacctgctctatatagtaagttccaggcccgtcaaggctacagagcaggaccttgtctcgattagtaaataaatactatatttaatgggattttcagagtcatattttaaaaacaactatactatcatttgtaggagaaatatgtgttctaaacaccacactgacagcagccatctggctttggttactgctccagaagggctgttagtccatctaagccaagactacaacgttgcctcggctgaaagaaaacagccaacctgggtggtgtgctagtcagacaaggacagccagtacactggttgttaaggttcttcgtggttatgtaaggggaaaatgcctttccctagcttgtcagtccagaacttataaagatgacctttcccattcaatgtgaatggggtgcccttcatagggttacgtcgggttaaagtcagggtgctcccaacctgaagcctcatcaacttaatacatgaatggctctttggaagactagatccgagcatcacctgttaaagatctcaagcaaagacaactgcccaagcaagaagtggctctgcccgggcagagttgatgagggcatagctaagggaacaactttctgcaggcttacttctgtgagtagcacccctccccaccccccatatggtagaggcaaggcagcctctggtttggggcttctgccatctccccgaaaagatggggattctgatcaggaaagtggcttcttggcttgctgtcagacattctagaaaggtgctcttcccacggggtagctccactgatctctgccagaaggtggcattctgtaccccagatgaaccctggcctagagtgaagtgcaaactcacggtgaaggggtcacaggagggctcgggggctgccggcgttgaggtctcatacaaagggtttgtgatactctcaggctgctgcttgccaaaggccaaggcatcaatgtcatcttctgactgttcagaaagagaatgacaagggttgagaggcaggactgtccccatccctgagccattcttctcaggagccttctcagcaacactgttgagatgactgacttgtgagagaaggcactgggcccacgggacagcttacatatctgaccaggtgtgtctcccaatctggcccataggacatctctacagcccagaaatgttcccatggcctatgctgccaattctcttaccgtaagcattgttgagcctcttgttaccctggagttgtgtggtcattcctgaacttggaaaggttatctctgatatgcatacttgttttccatattcaaacatgatgctttgaatgttctcacccatgcatgccttgaaatctagtccccttttgatctatttaggtgggcagaaacttggttgtgctgtgctatctgcaggacctttggttgaggtcaaagtgcacagtgggtgaagtgtgagccagtgggattgtgactctgagccaggacttggccctgtcaccctagttcattctctgcattgtgtggggaatttggacagtttcccctgtagcaagagagcccttaccaggggtggccacatggtttcagatcatccagctttcagatctgtgagctgaacagacctctaggctgtatgtgatctagttgtagtgttttggttatagtaatagatattttggacagttgcctctgagcttataaacaggcaagctatcttctggaaggcatgggctgctgcctgagggcgctgcacagcatcctctgagagtggaaaggagaccagtgaagagtagagtccacaaggaaggatgc

SEQ ID NO: 215 - DNA, 1765 bp, Mus musculus
aattggttccatccatcatgaacaacttgctgaatccagacgccattttctcgaacaatgagatgagcctgtcagacatcgaaatatatggctttgattatgattacaccctggtattctattccaagcacctccacacactcatcttcaatgctgcccgggaccttctcatcaacgaacacaggtatcctgtggaaatcaggaagtatgagtatgacccaagctttgccatccggggactccattacgacgtccagcgggcagtgttgatgaagatcgatgcttttcattacatccagatggggacagtgtacagaggcctcagtgttgtccctgatgaagaagtcatagacatgtatgaggggtcccacgtgcccttggagcagatgagtgacttctatggaaagagttctcatgggaacaccatgaagcagttcatggatatcttctcgctgcccgagatgaccctgctgtcctgtgtgaacgagcacttcctgaagaacaacattgactatgaacctgtgcacctgtacaaagacgtcaaggactccataagggatgtccacatcaaagggataatgtaccgagcaatcgaagcggatattggtatgtatgacagcattctctgtgttgaaaagtacatctgttatgctgatcagacccgtgcagtgttggctaaactggctgcccacggcaagaagatgttcctcattaccaatagcccaagtagctttgtagacaaagggatgcggtacatcgtggggaaggactggcgagacctgttcgatgtggtcatagttcaggccgagaaacccaacttcttcaatgacaagcggaggcctttccgaaaggtgaatgagaaaggtgtcctactctgggataaaatccacaagctgcagaaaggccagatttacaagcagggcaatttgtatgaatttttgaagctcactggatggagaggatccaaagtactgtattttggtgaccacatctacagcgatctggcggatctgaccctcaagcacggctggcgcactggagcgatcatccccgagctccgttccgagctcaggatcatgaacacggagcagtacatccagaccatgacctggctgcagaccttgacggggctcctggagcagatgcaggtccacagagacgccgagtcacagctggttttacaggagtggaaaaaggagaggaaggagatgagagaaatgaccaaaagtttcttcaacgcccagtttgggagcttgttccgaacagaccagaatccaacctacttcctgaggcggctgtcgaggttcgctgacatctacatggcgtctctgagctgccttctgaactacgacgtccaccacacattctaccccaggaggactcctctgcaacatgagctccctgcatggtcggacagcccgtctgccttcaaagcccctttgctgcaggaggctcaggccaagtagtcctgtgtttgcctgaggcaaaagccagaagcattcgtggcctcacagagggtcaggcagcctcagagttgcttcccagagtcagatgcgccttttgtattttttctatcttactatgaatactgtcctgtccaggttgaggcaggagctggccgcctggggcctcccggcccttctccacacaacagtgttgaaaccctgatgagaccttgcttatagtggaaccagcaacgtgggcctcttgatgagtgagacctcttgatggcttctgacaagtgagacctcttgatggctgcctg

SEQ ID NO: 216 - protein, 482 aa, Mus musculus
MNNLLNPDAIFSNNEMSLSDIEIYGFDYDYTLVFYSKHLHTLIFNAARDLLINEHRYPVEIRKYEYDPSFAIRGLHYDVQRAVLMKIDAFHYIQMGTVYRGLSVVPDEEVIDMYEGSHVPLEQMSDFYGKSSHGNTMKQFMDIFSLPEMTLLSCVNEHFLKNNIDYEPVHLYKDVKDSIRDVHIKGIMYRAIEADIGMYDSILCVEKYICYADQTRAVLAKLAAHGKKMFLITNSPSSFVDKGMRYIVGKDWRDLFDVVIVQAEKPNFFNDKRRPFRKVNEKGVLLWDKIHKLQKGQIYKQGNLYEFLKLTGWRGSKVLYFGDHIYSDLADLTLKHGWRTGAIIPELRSELRIMNTEQYIQTMTWLQTLTGLLEQMQVHRDAESQLVLQEWKKERKEMREMTKSFFNAQFGSLFRTDQNPTYFLRRLSRFADIYMASLSCLLNYDVHHTFYPRRTPLQHELPAWSDSPSAFKAPLLQEAQAK

SEQ ID NO: 217 - DNA, 88928 bp, Homo sapiens
  misc_feature (1)...(88928): n = A,T,C or G
ctagtgtctagtgggtgactcttagcccctctgagagtcagtcccttctctttgtttcatttttaaattccctctcagtcccttctctttatttcattttaaaattcccagctcagccagaaccctcttcaactgtagcagttggtctcttaatccaagtcagataaatgatacagacaaaccttacattttaacttaaatataaatccattctttctccagacttttaaatgtgtaattaaaatatctctctctctttctctttctctctctttaatgggtcctctgattggaattagatgtcatcttctcaaaatacatcaccctccatttctagttttggtttctgaagggtgacaacaattgtgatgcagtctgtgtgcagtatccttctaagttgccgcctttttccccctcaatcttttgcagttatcttgtccactcacaatttggacttatttttcttagcagctcagggtattgagcctttcccaagaattcagtctggttttcagagaaaacaactcctttttatctcatactcatatcttattagtctgtattgcagtcagttaaattacctaattagattgacatactcaattgactctggggtataccagaacccaactgttgggaatagaagtatgccagcaaagtagagataagcctgctagctgcaggcatttagtgttacctggacattggggagtatgttttatagaagaaatggagaatcctggttaatccagaaaaccagtttatgtgtgttaacagagcttactttttatttgtgtaggcttaatcatttttaatagtttatatattgtaaaccgtattgggtgcaaaaaaaatgtcaagtaggcctcataaacttagaaaacttttaaacctggaaagggctctagaggtcactgaactaattttaaagctgagggaatagcagatacatcacatgacctgccccagtacatttgatcagagaattctatggattagatattataatcatcgaggctcacaaagaccaggcacagctagtaagtagatctcagacttggcatccatttctctgaccccagtcccaagcccttcccgctgtttgtgaactctaggagtttgtggtcttgttggggtgacaagcacatgaagagaagtgcaatccaatgtgttatgtactgtgacggacattggagagggcacagggatgcacagaaacgaggcaagaaggaaggctttccagagacagtggcttgggctgtgagttctgacaggtgcctggtgaagaagttcatgaggagcattttaggtaaggagaatcagcatgaacaatgtcaaggaagggagaacttgggtggtttgaaactctggaatggggagagttggggaatgatgctgaaggaatcagcaaggtttaccaggctcaagggcttgacagggaagctgctgtaggatttccagcactaaggggcatgagtaagtttgtgtttaagataaaacaatcttgtgaccaaatgggggatggaattggtaaactaagaggggatggtagaaatagagagagagtgtcagatttgagacttagtaggtaaatccaacaggcttggtgcttgattggatgtgggaggtgagagaaagccaaaagcatttcccagtttacgactatatcataggtcagtgcacctgggttcatgatgctgttggcattgcaagagagggagcatagtttggtagggtggggtgggagccacagtgagctaatttggggcctgttgagtttgaatgttctatctaagtagagacattcagtaggcagtaggacatatgagtctggtgcttaagagcttgaagactgagccagagaaaacatttgggagtccttagtgtacacttgctggctcaactcagtagaatggttgaaagaagcaagaagaatgtaagacaagacaatggccagagatagaacttggaagaatgccagtatttaaggggtgagaagaggaaagggctgtagtaaaagatgaagaatggctccagaggcaggccaagaagcagtcaaatcaatgaagccaagagtggagagtgttgagaactgactgccagattgagtacggaccgctgtgtttagcaacacagagatcacagggaatgttcaattttggtggtagagacaaaagcctgtttaagagagaacaatctgttccctctgcttaaaggtggggctcctgcacaggcccgtctcctttaattggtgcagtgagttcatgcagaactgggggaagacaacagaggacgctacttgccatctgcaaccaggtccttttgggccagactaggccacggtttcagtggagtggggtaggggaaaggaccccttaacctcttttactgttttctttggagcagaaattgagggcccatggagacatccaattgcaaccttttactttatttgggacaatgatacacagctttttccctaacctgtttatagatacacacatttatggaaagaataagcaaacacttctaggttaagttcatagtttaaaaaaaaaagaatgagcaaacacttagtttctcaaacttaaggattttggacaaggaaactttagacacagcctaattatcaaacaaaaagaaacgttcaacaaagagcctttagatagtgccaggccttccttcctctttacaattgcagcccatcttctagaatctagacagagactatgggctgtgattgtcctcacttcttaatcccattcgctcccagcacagaataactcagtggatgctgcccagtaacgaactatccctcccaggggtggttcatccactgagttattcattcagggaaacttcctgagacctctgtcaacactggagagatttcactgtcacctggagacaactgcctggattgttgctgttggcctgggaaaaaagtaaacatctctcacactggactggcattgcaaaaatccacctgttaggtgacagcaaatattatgtgaagcaagaggaacatgacttaattttaatttcagtagaataaaaattaggaaaaattgtgctttagaagagtacttaataggatagaggactatctttggatgaaatatcttgttttgtttttctaaggaaataataaatattccaccatctttttaatgttaagcactgaaaataaagtggggagactaggaaaacttactacttaaaatctgagaacagattcgtaagagtgttcctcggaccttccccccatccccacccccaattcacattccactggaaataagatgggtgtggctctgtccagaagtacaacatagaaaaggtaactgatgctttctttctagatgtatttttatggaaaatcttccctggaaccaacaaaacaggaagaatagtgttctcttttctcacttctagaagttatggtcctggatcctagggacctgagttggaatcccagttctgctatcttcttggcttgtggacaattgagactctctgagtctcaattttcttaccaatcaagtggttataatatagtctacctatagggtaattgtgaagatttaatgatataatatacacagaacagccaatagagtacaaaattaaatgttaggttccctccccatccagggcaaaggtttgaggtgggaagaggttcagtgacatctctccaatttaaattcacccattctggtctttcctttttcctgggttgggagaactgactgggttgacccaactggtaccagctccaagaaaaatggaataaactgggggtggggatgaggcaagaatgtcctttccctggcttgcttgccgcctgagtcagattgcatccaagaaagttctgaggtcaaagctataggtcaggtctagaatgggtcaccagggaaaaggggcatgaggagttgtgtgtggccaagagagaggcgggtagcaaaggcatgaagtagtgtatgcaaagggcaccagaaacttgtccgcatgaaaatctcaatcccatagcaagtcagattctcttcaggggacttgggcagaatgaagagagtcagtcacacctgtgaatctggttattggtgcccagagaatctctgaggatgggttctgtgtttgccaccacatgacacatccagtttctatttttctccacttttccttttaaggccaatgcaacttggtcgtcaagaacagggtaattcacaagtgtcttctgctgagctagactgaggcacctgggaacatcacagggagtcatgaaaatagttcaaaaagaagaaacatagtcacagatcgctaagcagagacagcagctgaaatttcctataggatttccagagaaagcttcaggcaatgtgagatacagagtctgatccacgaagcagagccacagagagagaacatctctgcgagcagaagccacggctgatattcagaagcacagtccagaatggggaagaggcagcctagtgtagcagtgcagggcacggacttggggatgaggctgacccaggactgttcttccatgaactagaacaagttccttaagctcatccagcatgctcatctttaaaagacaagtaaaatgaaacaggcactaaaaattctctggaaggacacattagaaactaacgtcagtgattccattttagaagactgcacagatggagacagagaagggaaagacacttttcactttacagtttgatacattttcatttttgaaccaggtggacaggtgatgataatttataccttataagattacacagtcctgacagatggtatttatatatatttgctgttattgttgttaacacaggaacactgactgggtcatctgtcagtgtttttagcctttacacaggcagcagtctctttatcacatttctaagcagtgccttacacacagcagccttacgttatgtttataatcaatggtataagttcagccccttaaaagcagtcttgtaaatgggtaaaatgaataaataagtaccatctgcaagttagattgtaaaatggattgtttttattttaacaaattttagagaattcaattttattattattattattttttaagatggagtctggctctgtcacccaggctggagtgcagtggcacgatctcggctcactgcaaccttcagctcccggattcaagtgattctcctgcctcagcctcccaagtagctgggattacaggtgcgtgccaccacgcccagctaatttttgtgtttttggtagagacagggtttcgccatgttggccaggctggtcttgaattcctgacctcaagtgatctgcccgccttggcctcccaaagtgctgggattacaggcatgagccactgtgccaggctgagaattcaattattgactgtggcagtttgaaaattttttctcaatttttttattttgataaatttcaaaccttcagagaaatttcaagaatagtgtagtgaaaggtcatataaccttcacctatcttcatcaattttttttaaattgtaattattattttttatagagacagcgtctccctatgtttcccaggctggtctcaaactgctgggctcaaggaatcctacctcctcagcctcccagagggctgggattacaggcatgagccacccaccatacctggcccaccaattgttaatattttgccacatttgtgttctctctttcatatacaggcacagacacatatatacataattttttttctgaactatttgaaagttagttgcaaacatgacacttttatctctaaatactgtacttcagcatatgtcttctgagtacaaggacattcccccatataaccacaataatcaaacccaggaaatttaactattacctaagactattatctaactatagtccatattcaaatttccccaagtatctagtaatgtcctctatacctgttaacttattgaggatcttgcattgcatttgtctcttttagtctagatttaagtacctttgttttgtcattatgacattgactattttgaagagttgaagtcaggttccatcctcccatccctatcgcaatgtccttcaatttgtatctgtctgattctttctttctatttttttgagacagggtctcactctgttgtccaggctggaatgcagcagtgcaatcttggctcactgcaacttcggcctcctggtctcaagcgatcctcccacctcagtctctcaagtagctaggactatagtcacatgccaccatgcccagctaatttttgtattttttgtagagatggagttttgccatgttgcccaggttggtcttgaactcctaggctcaagtagtctacatgtctcagccttccaaagtgctgggattacaggcatgagccactgtgcccagcctgattgtttctttatgatgagactcaggttaaatatttttggcagaatattacaaataagtcatgtttcaatgccaccttttataaatgtttcttatccttctcttttaaatgtgtgaagccaggaataataaaaagtctaataatcttattttcaaatatctagcaggtcatttattggcaagtgactcttgtcatcacgtcatgattgaggcagtaggctatttatacagatcagttgatttaagggtgatccacctgggatcttctcattcatcaatccatggaatccatggaatcctgcagtgagtttctgtttcatgttccaaacagaaatatgcttctggttattcatgctatatatatgacctcttgacaacttttgatcttttgcagccttctgagagaaattgagtggatccggagccggagatattggcctcaaggtatgagccagcaacattctgagggttctaggaatggcttctcattatgggagcacttggttaaattaaactaccacagtgctcagagttctaatacagtgagctctgcaatgtgcatgaatgcagataaattacacagggctagaagaatggacttggcacctcagacaatttcagataaatcaaaatgtgctcctggaaaagggaaaaagaaacccattatttgcatatctgccgaggaaaagatacaacggaagacacaaaataatgctgaaatatggaatggctcaggaaaggaagcctcaaagaaaaagacagcctattcctctaacattttatctttgggtaaaatgaatggtttaataaagctttcaaggcaaagaattttgttagctaaaagtgagagtggagaaggcgaaatcaccaccatttaccaccatcccctgccatggcctgttagcacaaaaaaccctggggaatctgagttcatatcagaaaagtggctttttcatagcccagattatatttcaatatctcagaagtcttttttgcagagaagacttcacattgaaacaaaactgttgaagacctcaaatgatattaataaagaataaaaatgtatcatgggctttttggcatctgttttttccacttgtctttaattagaactcttttattggatattttgttctgaagtacacaggaaagataataatcaaggtctagaaatatgattatttaggcacttaaacactgtagctcattttacttaaggagaacaatttttaggtgattcacatttctatggtaggttgatctcatagtgttccatgtttctatgttgatctcatagtgttccatatccaaaagtatacagaagcaatgttattaaaattctaattgtattatttttgcattgctgtagtttatctattttgaatttatgaattaattttccatgtgaacaaaatttacaattgctatcaccaaccctttttatgaaacatgaattaaaaaatatataatttggcataaaactaaaaccacaaagtaagtttaaagtaccagagcccgtgtatttgatatcatatctgttttaaacattttattgtctcattttatcagtgatttgtaaaacattaaccattaactgttaaggattacttattggctactttcttccctgtcacccacctaaatcctacatactatatgttagcaggccaaatggaagaatgggttcagttgtgtggttttaggaaagttatttcatctttcttggcctcggtttcattactgtcagccttctgtatctgcaggtttgcattcgtgaattcaaccaaccatggataaaaatattagaaaaaaaatcaacaatgaaaagtaatacaaatagaaaatacagtatcacaactatttacagagcatttatattgtattaggtatgaaaagtaattgaggcctggtgcattggcttgcacctgtaatcccagcactttgggaggccaaggtgggcggattgctggagtccaggagttcgagacaagcctgggcaacatggcgagaccccgtctctacaaaaaaatacaaaaattagctggtcatagtagttcacgcctgtaatgtcagctactcaggaggctgaggtgggaggatcgcttaagcagaggaggtcgaggctgcagtgcactgcgatcataccactgcacaccagcctgggtgacagagaaagactctgtcttaaaaaaaaaaaaagtaaacgagatggtttaaaatatatagaagtatgtgtgaacgcaaatactagccattttatataaaggacttgagcatcgcagattttggtatgtaggtatggggcaggtgttctggaaccgattctcggcaggtatagagggattgactatattataaaattggagaaattatggagtctgcttttcaggattactgagaggattacatgagatactgcatacagcaagccttcaataaatggtagtttaaacccagatgccacctttttccatgaaacacctccagacccctccatcccacaactggagcatacactaatgccttgggttatttgtcttaaactgtgttccacccatttcacacaagccagtatggtctccttggcagagtgccagccttgagggccattccccctactccacctgctcaaaattaagtaaccacaggacagcttgggaagtccttgctgcccggcgattttcagcagggttctggctgggccacatcagtctttcctgcagaagctctgtctgactcagtccacacagaattgcccccaggcagggaggttgcggttcatttggctttagtggaaccacaggcacaggacgggtggagcctagcaggtttgagagaagacctgtgcaccgagccgttagcgtgggcaggggcaggagctgggtgaccatgttccaatgacctctgccgccaggcggaaacctaggcggggggcgggcattggccttccaggctgtgtaatgggagggcccttcaaacttactgaggtcttaaggggctgggatcctccagccgacatcagcccatgagtggaacctcggcccagccacccactcacaggtcctcctggataaatttaagctggggatcggggacgtctcagaggggccccacgatccaggggaggtccagactgccattaattagactgccagaggccattaatgcggagagaggtcaccttctagggccggggccagagcagctggggtgggaggggcgctgtccttgtggccagagctgggggtcagtcccagaaggcaggacgaaggtgcggcggagctgggcgggcggcgctggggtcgtacctcatcattccatcccatgtggcctgcgcgccaccacaccacacggccacccccgcgccaccctgaaattgaccgcagtaggctgggcgtggggcccccggcccggccccgccccgccccgtctccgcccccgtcccagacccgcccactccccatcgaccccgcccccgttagaccccgcctccggctccgcccactccccgccccgcagcggcgggagggcaggcctgcgccgccacgtgttccgacgcaggagctgccctcctgcagggcagagcgcgggtagatcttgggccgggcagcagcagtcgcagagcggcgcggcggcggtggcggcagcaggcagcaggcatgaccatggcagcggcggcggtggtggcacgcggggccggggcgagggcagcgacagcggcggctttgcggggtggctgcgggaccgcggctcgggggcggccgtgtgcgggccccgcccggcccttgtgcactgcacccgggaccgccccggacatgaagcgctacctgtgggagcgctaccgggaggcgaagagaagcacagaaggtgagtgaggcggcgaccccgccccggcgcctggggcccctcctgcgcgctcagctgggaagcgggcgccctaggacccggaccagcccagctgcggacctccagggcctccagtcgcgaaccccggtgcccacacccccagccgcaggcagcatcgctcctgcggagcgactcggggaaacggggaaaaatgcgctctagaaacttcacaactcgcgcctttccccggtcgggaaagctgttgtatatattcttgggatttttagcccgaaatctgcatctgaggggctttgggccgcgcggggctggggttcctcaggcctcccttgggagccggccactcccacgcaccgttaggtgttgttactcatcaatagtaataatagtaacagccgagtcgggctggcgcagagatgcccaagagcggggctgctggggaggtggccgatcccgaggctggtctgttttccttttggtgggggtgggttgggatgggatgggatgggatgggatggaatgggatggaatgagatgagatgagatgagatgagatgagatgagatgagatgagctgtgcggtgtttgaaagaggagaggtccaggtggggaaggttctgggttatccattaacctcggtgaggaggggattctaaggctgtgaatgggaacttcatggccaggtgcacataaaatgagcttggctcggttgttactactaatgaactaataaataccagtgccgggcacgtagattatctctaaatcgttcctgtaatctacgaaggaggttccacatccccattctatagatgggaaaggcgagactcaggtttaaatgacctggccaaggtgacgcctgaatttagggactgtctcagctcctaacccactgtcctgtttcctgtgctccgttgaccatttgggaaccaataatccattgtcgctgttgcttccaaggaggattcagaaccgaaatttgtatattggttacttcttgttgtggaggtggcacatagatagggagagattatttggtgagcaagaacgttttataggatcacattttccattttttttggccagaagtcagtttaatgaaaaaagcaaattggagtgattttcagaggggacgtaaaatgactagcaatgcagaattctatgaaatggtggcttactttcttagtttccctttgccaagagttaattttgctttggcttttgaagctgttgtgtggtatggtggaaagaagactggctttggagacattgggaattttgcaggtcttaagagatgaaaggaatatagaagattatcaaacccagcttttgggcaggaaagttttttttttaacttgtaattcttattgagataattgtatatttacatgcagtttaagaattaatagaggggccaggtgtgagctcacgcctgtaatcccagcactttgggaggttgaagcaggcagatctcttgagcccaggaccagcctgggcaacaaaggaaaacccaatctctacaaaaaaatgcaaaatttaggcaggcgtcgtggctcacacctgtggtcccagctacttgggaggcttgagttggggaggatcgcttgagcctggaaggttgagactgcagtgagttgagattgcaacactgtactccggcctggttggcagagccagaccctgtgtaaaaaataaacagaaaaggactaatagagggagatctggcatacactttatccaatttctcccagtggtaacattttgcagaacagtagtacattatcacaacagtatatattgatacaggccacagatcagagtgtcattttatttgtacttgtgtgtgcacatgcatgagagcacagatgtatttctgtacagttttctcacatgtaggttcatgtatccaccaccacagtcaagggactgaacagttcctcataaagatccctcattcggtctttatagccccacccatctcccccatcatgttctcccttgtccccaatccctggagcactatttgttctccatttctaaaattttgtcatttcaaaaatgttaggctgatggagtcatacagtatgtaaccttttggagttgttttttttcaccaagtataatttcctggagttttatccagtgttatgtgtattgtatcaatagtgcattcctttttgctgttatttcatggtatgtacataaaacagtttaattgtttgtttaaccacagattaactctattgaaccatttacccatagttcaaaggacatttgggttgctcccagtctttggctgttacaaataaagatgttgtagacatttgtgtacaggtttttgtgtgaacatacattttcatttctctaaatgccaaagagtacaattgctgggtcaaatggcaattgcatgtttagttttataagaaactgcaggcaaaatttttgccatcctgatttatggataaggtttgttgcttgctgcctgtgagaactgggaggtcaaaataggcttgagtttcttcatctgtaaaatggggctgcaggtagcactagcatcatagggttcaggtgagcaatggatgagtccatccatgaaaggcatttaggacagtgcctggcgcatgagacagctgaagcatgggatggggaagatcaccttgtgatatggtttggctgtgtccccaccaaaatctcaacttgaatcatatctcccagaattcccatgtactttgggagggacccagggggaggtaattgaattatgggggatagtctttcttgtgctattctcatgatagtgaataagtcttgagatctgatgagtttatcaggggtttccgcttttgcttcttcctcattattctcttgctgccgccatgtaagaagtgcttttcacctcccgccatgattctgaggcctctgtggccatgtggaactataagtccaagtaaacctctttttcttcccagtcccaggtgtgtctttattagcagcatgaaaatggactgatacagtaaattggtaccagtagagtggggtgttgctgaaaagacacctgaaaatgtggaagcgactttggagctgggtaacaggcagaggttggaacagtttggaggactcagaagaagacaagaaaatgtgggaaagtttggaacctcctagagacttgttgaatggctttgacaaaaatgctgatagtgatatgaacaataaggtccaggctgaagtagtctcagatgtaggtgaggaacttgttgggaactggagcaaaggtaacttttgttatgttttagcaaagaggttggcggcattttgcccctgccctagagatttgtggaactttgaacttgagagagatgatttagggtatctggtggaagaaatttctaagcagcaaagcattcaagaagtgacttgggtgctattaaaggcattcagttttaaaagggaaacagagcataaaagctccgaaaatttgcaggctgacgatgcagtagaaaagaaaaacccatttttttttgaggggaactttaagccgcctgcagaaatttgcataagtagcaaagagcctaatgttaattcccaagaccatggggaaaatgtctctaggccatgtcagagaccttcatggcagtctttcccattacatgcttggaggcccaggagggaaaagtggtttagtgggctgggcccaggccccatgctgtgtgcgctgtgtcctagctgctccagctgtggctggaagaggccaatgtagagcttgggctgtggcttcagagggtggaaaccccaagcctcgtcagcttccacattgtgttgagcctacgggtgcaccgaagtcaagaatcgagtttgggaacctctacctagatttcagaagatgtatggaaacacctggatgcccgggcaaaagtttgctgcagagacggggccctcatgtagaacttctgctagggcattgcggaagggaaatgtgtggtgggagcccccacacagagtccctactggggtactgcctagtggagctgcgagaagagggccactctcctccagaccccggaatagtagatccaccgacagcttgcacctgcagaagccacagacagacattcgacgcccacccgtgaaagcagctgggagggaggctgtaccctgcaaagccacaggagcgaagcggcccaagagcatgggaacccacctcttgcatcagtgtgacctggatgtcatgccgatacaggatgcataaacattcacacgtcccaaaatcccaagttaaaaaaggaaaaaggaaaacattccaattgagggactttctacaaagtatataaccagtactcctcaaaactgtaggtcatcaaaaacggggaaaagtctgagaaactgttttagcctaaagaagctgaacagacatgacaactaaatgtagtccatgtagagacctggagtcaaaggagatcattttggagctttaaaatttgactgcctggctggattttggacatgcatggggcctgtaacccctttgttttggccaatttctcccatttggaatggctctatttacccaatacccgtaccgccattgtatctgggaagtaactagcttgcttttgattttacaggctcataggcggaagggacttatcttgtcttagatgagactttggactgtggagttatggttagtgctgaaatgagttaagactttggggtactgttgggaaggcatgattggttttgaaatgtgaggacatgagattggagggaccaggggcggaatgatgtggtttggctctgtgtccccacccagatctcatcttgaataccatctcccagatttcccacatgttgtgggagggacccagggggaggtaattgaatcatgggggctggtctttcccatgctattctcgtgatagtgaataagtctcacgagatctgataggcttatcaggggtttccgcttttgctgctgcttcatttttctgttgctgccgccatgtgagaagtgtctttcacctcccgccatgattctgaggcctccccagccatgtggaactgtaagtccagttaaacatcttttttcttcccagtctcaattatgtctttatcagcagcgtgaaaatggactgatataccgttggaccagagtttgggctttgatgtgtgacagtccgaggaggattttggagtatgacagccgtgttactttcctctctgaccttggtttcctccattgcgatatgggattaaggtggagatttttagtgtgtgcttggcacccagcagatgctcagtagatagtagctattattattaattatgaaataactatcagtcttagcacatttagtaagaggtggaggtgggttatttagctctagagtctgggtctccttgtgattagggcggtgccataactagctttgtgtccttgagcaagtcaccaaatccctcctggctttggtttctgtctctgtaaaatgaggccactgcactaaataatatccaagtctttttaagtgtttgaagtattcacgtgttagaggtacaggattcggtggaccctatcttctcttcatgcccacagcacaaatgcatgtggtccctattacccctgagaatgtggggtcattcatgaggctttttcttctttgtcttgtccagaactgcaccattccttctctcctcttgttgaagtctgtgtgaatttatgtgcccagcttgagttcatccaacaagcatttattaagcacccagcagtgggtttgaaggctgctggttcacagttggatgagtctgatagggagggttcaacagcggctgagttactgcctgtacagagctggggaccagtgttgcatggatgaggattctggtaaacagatgagtgacattctacctcaggggaggcaagcagcgaggcccaggggctcagggatgcgggaaatgtgtctctgaggctgacccttgagctttgtcttgtaggaaggcacagtcagaagaagtaccgatgaattcatttaaaacatgtagatctccccacccccagttgcaagaggacaaaataattttattttcttactttctttctggccacttgatctgtttctttcatccaaacaatctgttcaggtgtcttccctttaaaaggctcccagagtgaagcctgcacagggaaaggatgctttttaaagctttgttttatcctttctctcccatccttcttgtcattttaattaaaaagtttttttaaaaactttattttttagatcagctttagatttacagaaaaatgacatagtttttgtaagccctacacccatttctcttattaatctctcacattcctatatttgttccaattaatgaaccaatactgatacattattcattgtttactcagttttccttcgtatttacctaccctcctttttttcttccagcctgccatccaggatagcacactacatttagttgtcgtgtctgttcggcttctttaggctgtaacagtttctcagactttttcctgtttttgatgacctacagttttgaggagtactggttacatactttgcagaatgtccctcaattggaatgttttcctttttccttttttaacttgggatttttggatgtgtgaatgtttatgcatcctgtatcaaactcagctcaagaaaagcttctttatatttttaggaaaagaaataactggtttaaacctgtagcaaaaacattagctgctgcagttttcccctggagcagtggttctcagtgggagctggaggggcagttttgttccccaagggatgtttggcaatgcctggagacctttttgtcacagccaggggagaggggtgctgctggcctctagaggccagggttgctgctaaacatcctacagtgcacagggcaatatcccacaacaaagaattatctggcctcaactgttggtagtgccaaggttgagaatcctcgttctaaaatgaattctaagaaatcttcgtgtgatcataattgaaagggctggatatgcctatgtgtggtctcttcttttctgttgtgctttaatgttgcgtgtgtcttctttgaactcaagctctggccttccaggtgtgctcatcagatacttggcctgtcctgttaggtacagaatggaagccttcctactcctccaagacgggttgctccaaccttatattttgttagtcgcacggattttttttttttttcattagaattaatcttggagcctggtttatttagaatgtttcactacttggctggggttataggctgtattaaattgtggaaagaagtatggggattagttagaagcttttatagggtgttgaaagatttattcaaagttctgggtggagaccatttactaatcagtcaaaaattatgtgctgtatttagtgaggactgtgtctacatgatgatgtaagcttagcgtgtataagcataagacacaaggataataataattctatataatatgtaatattaaatacagtgaatagtaatagtaagcataagttcctcaagcaactgcattgggttaaagatactcttgagataattttaaaattagaccaatatttctcagactgtttcacaatcttttgagagatgtggttaaagagatgtagaaaatacatgttaaagaagcttctttgtagctgggcttttcagagctagcttcggagctagtgagtcagagcctttaaaatgaatgaatctctaaaatgaatgacgggggtagtaggtttagtgcttcccaagtaaatttgactgtggaggcccctttttgaggtgataagtctattttgaggcttgacagaatatacttgggaagttataataatatgcctaataagaacatatgttgataatactgaaagatgcttacaaccagaaatgtgctttttctacgcagcagggatatagagtaatggagtcataggacccactgagaatctggagaaagctgtgtgttttttctttataaaaagacacatttgcagtattacacataatacttgagcacacacaaatgattttgtatataacttcaggggattccaggggaatcttagtgtcttctggtgacccagtgctcatttagtgcttctgttacgctttaggaaagtttgaaggattgagctgttatgctcaatgatccttatggaggcagaactcagcatggggactgttttttagatttaaatttgctgctgggtcaagaagcctgcctggaataatgatattttttggcctgacttttgctgctgagtgttatgattttctgtaattgccgtggaggtggctcgctgatctaccagttgaaagctagagttcattttcccctttcattagggtgtaaattctgggtagggtaaagaggaagtgaaaggagaaaaaatacaaaaaggagattaaataatttttttgccagcttttgaaggtaagacaaattaaaaaaaagaattcagtggtcctcaaactgataggcacatcggaatcacctgggaagcttgtttaaaaatggaaattctgaggccctaaccctggagattctgattcctaaaatgtggaggtaagacccgggaatctatatttttacaggccgggtttggaaaccaatcttttattgaactcttaaagacatgtggaaacagatgtcctctaaccgtcaagagttcttttggactttggctttcagcagtctggcagactagatcgtctaaaaacctttttgtatagaatacccacacgctgaaaaaaaatatagaggactttctcttgaagtcataactgaactctgagaaactggagaaatctcaaggactaataatgaagaggaagccgaggccaggcgtggtggctcaggcctgtaatcccagagctttgggaagccgaggtgggcagatcacttggggccaggagtttgagaccagcctgggcaacatggtgaaaccctgtctctactaaaaatacaaaaattagctggacgaggtggcatgagcctgtaatcccagccacttgggaggctgaggcgtgagaattggcttgaacccgggaagtgaaggttgcagtgagccgagatcacaccgctgtactccagcctgagtgacagattgggattctgtctcaaaaaaaaaaaaaaaaaaaaaaagaggatgctgaaacccgaatgatgaccagccttgaaggtgtgactgttctgggaacacttgttggcctttattggtcgtgcctgctgggagggaagactaggcattgggcgcacacacacacactgttggagactctcctataaaacctggtggccacagagtgcttccttccgtgcagggagacaatagagaaacttctctcttttggtctttgctctagatattttttctgtgtgtgggggggcaggttttggaagtgtcccgtgaccttgtaatcacaagctcgtcctcacatggatttgggtttgaatttattcttcttgtattgtctggcaatctgtatgagtccattcttttacattgctttgaagaaataccggagactgggtaatttataaagaaagtggtttaattgactcacagttccacatggctggggaggccttgggaaacttagaattgtggcagaaggcacctcttcacagggcatcaggagagagaatgagtgccagcaggggaaatgccagatgcctataaaagcatcagatctcatgagactcactcactatcacaagaacagcatgggggaagctgcccccatgattcagttacctgctcccgcccttgacacatgggggttatggggattacaattcaaggagagatttgggtggggacacagagccaaaccatatcacaatcccaactgagaaactgagtgatagtgatctgggactcctggtagaagccagtgcaaactctctggataaatagaccgtaaacccaggcctcctaggattctcaagattagatctgagcttacaatccaaaatttaaaaatacacaaataagccaccataagggagaaccagcagactcagcagacagcacaattaatatgaataggacttaagatattggaatttttaggtaaagaatatatgtagtgctatctatgagtgtttgaaacttttggagaaataagagatgaaatggaaaatgtgagcaaagaatatgaaactactaaaatgatcagacaggttttaaaaagaaccaaatagaaattttagaaattaaagtttcaatctttaaaattaaaagtttagtggaatgattttaattggcagattagaaaaagaagaaaaaagaattagtggtctgggggataactctgagaacattacccagactataatataatcaaagagatggatattatgaaaacagttgacagactgatagcgtgagaggtcaaacatatgtctaattggagttccagcaggagagattgggaaatgggggagagaaaacactcaaagaaaaaattgctcagagttttccaaaacaaatgaaagacagaatcctcagatttagaatgcaaagcaaatcccaagcagtatgaataagaagtaatatatacaaaagacaaagagaatatcataaaagtagccacaaagacccaaaggcatagtagttaatagtatagaccatggagcaacatacctgggatcaaatcttaacttcaccatttataagccatgtgaccttaggcaaatgatgtctgtgtgtctcagtttccttatatgtaaaatggggctaacaataatacctgtctccgaggattggtaggtttaaatgagtaaatgtatgtagagtttttaaaatagcgcctattgcgtagtaagttccttgtaaatgtcaaccacgattattgatagtattattactacaaaggactaggagactgatagagttttgaacagtgatagcagaccattcaagacagtagatcacctcaaagtgctgagagaaaaatgtcaatttagaattgtatatctagctcaatcatttaagaaagagtgtaaagagaccttttttttttttctgattaaaagctaagagctttaccatcaaggaactcactaaaggaggaacttttaaaggatgtatatgtgtcaggaaaaaaaatcccaaaggtcttagatggaagtgaaaatggagaaaaaagaaattggtagagatgtgaataaatctaaacaaatattgacaatgttgaaatcagtccaaaagtgggtaggagaaaaggtaaaagacacagaaaaagcaagaaatagcatagaatgtgatgggggaaatatttccaaatatattaataatcatgataaactcagattaaaagacagattgtcagatcagatacaagaaacattccagctggatgctgtttataagagatgtactccaaaacaaagatgtagaaaggttgagattaatagaatgggaaaagatatcttgggtaaatggtaaccaaagaaaaccagcaagttataaatatcaaacaaatattgaaatggtattaaagggaaatacatactataagaaaggttgcaaaccacagttcatgggccagttgtagcctgatgtctctttttgtatgttaagttttattggaacatagccacacccatttgtttctggttctccttttgtgctaggatgtcagagctgagcagttgcaacagagactatatgcagagccccaaatatttactaactgaccctttatagaaaacatgtgttgtctgctgaactagaactacagaaatatacctacatgggtgactctcactagaataattttgagtaaaaaggaaaaagcaagtattgcaggcatataccaattacaaaaggttttaaaacacataaaaatactatagattacttgtagggacacacatgtatgtggtaaaagtctagagaaatgcaggagaggccgggttcagtggcttacgcttgtaatcccagcacttgggaaggccaaagtgggcagatcacttgaggccaggagttcaagaccagcctggccaacatggtgaaaccctgtctctactaaaaatacgaaaattaactgggcatggtggtgcatacctgtaatcccagctacttgggaggccgaggcaggaggatcacttgaaactgtgtggcagagtgttgcagtgagctgagatcacaccactgcactccagcctgggcaacagagtgagactccgtctccaaaaaaaaaaaaaaaaaagaaagaaaaaatgcaggagagtggtaaacaccgaaatctgggtagtggtaatgtcagaggcaggaggagcctgcaggtgagggtggaagggattttatatcccacttggatggtagggatgtgggtgttctttgtattatcttgacctttctttatgtcttagaaatagcaggatatattctttaaaagtcttccccatagtttaggcatatgatgttgatcctgtggtcgtacaagaaagtagtaaaaagatttaagggagaaacatgccacatcataactttcacattttcagataggaaagaaatgcctaaaataggagaacctaagactctggccagtggaggggcctctggaggtcatagagttcagtcctctgctggaagaaggaatccctttttccatagactttattagtggccatctggcatctgtttgagcttgttgtgtgatcacaaggctgcccattttattttggatggctgagtcacagagagtacttttgattccccttccatatgatagtcgcttaaatatgaaggtggtgatcatgcatcatcactgcaactcacctttgatttgatcattttggaagctcaactttgctttcactctagtttgtcagtatccctttgaaagtgaaccatttgttcctgaccatgtgtggtctgactggttcatggtggagggaagcaactggctcttccttggtgaacaaacactgtacttctgtaactttaaaagttaattcgtgttcagtttgtggtcagccaaatcctgactttgtccttcttgtattgacatgatgtaattttagagaaggaaaacaaaagctttaaaaaaatcttctttgcaaataagtacttagaagacaatgatagaattctattattttttaaaagtcaaatactacatgttatatctaggagaatgcagagagaaagagaggctagctgattgatcaagctgggttttataggaaatttttatactttaaaggattggtccttaatttgagtaactctttttcacttcactagggttttgaggaactgtttcatgataagttaattgataagataatgatgtataaacctgaatataattttaatttgtatgtagagatgcaactctctgcatagactgtaatattttgttctcattcgagcagaaaaatctacttgagaaacactactagtgaatattaatccttagctaaggtagcagacctttcaaatgttttgccctcagtactcttttatacactttaaattattgaagatcctagagtttcggtttatagattagtctcaagtagacttttaaataatgtattctgcccttatgttgatagtgattgtattagaaattaaaacccagagaattttaagatatgtatttattgattcatttaattaatttattttttaaataaattcccgggctgaatttatttaaaattctgactctgactcccaggctgaagtgcaatggcatgatcacagctcactgtaacctccatctcctgggttcaagcaattctcctgcctcagcttcccgagtagctgggattacatgtgtgttctaccacacccagctaattttttgtatttatagtagagacagggtttcaccatgttggccaggctggtctcgaactcctgacctcaggtgatccgcctaccttggcctcccaaagtgctgggattacaggcatgagccaccgcgcccaggcatatgtatttattgattcatttaaaataccagtctgttacctgtcaacataaatcacatgctttttatgaaaaatgactattatccaaaataaaagaaatttagaagaatgtcatggttttatatttgtgcaaagttctgtggtgtctggattaatagacagattcttaaatctgattctgtctattgcagtatcctctggcaaaagaggtgagagtgaaaaaggcagattgtctctgtatttaattttcattgcttctgtaacaaattaccacaaattagtgattgacaacagtacaatatattgtcttcatagttctggaagttaaaagtctgacatagatctcactggggtaaaatcaaggtgttgcaggactgcatttctttctggaggttctgggggagacagttttcttaagcttttcagtttctagaggctccccacattgtttgtagccccttgcattttcaaagccagcaatggctttctgagtctttctcaaatcacatccctctcacactgaatcttctgccctccttttccacacttaaggacccttgtgattacattgggtccacctggataatccaggctaataactttatttgaaagtcagctgataccaatcttaatccatctgcaaccttaattctcccttgccatgtaagataacatattcacaggttctagggattaggacgtggatatctttggagagccattattctgtctgccacatcttactatgagaatagttttgatctcaaagattccctggagaggaggttggggaggtttcccagattatgctggtaactgctgatctaggaaaaattatttgttgaatgaatgaatagaaaaaagaagggactgacagttaggaagcacctactttgagccaagcactgtgccaaacatttgacctaccttgtaatgtttaatggctgtgtgactttgggccagctgctgcttagccttattttccccatctgcatatgagggattgtagtatttacttcatggagttcttgggacattaattgaggtgatgaatgagaagaacccggtgcacagcatgtggatggcatttatataggcatacatatttcttttctacttcctgtatattctaatgaaaaatttttgagtttgcctattttttgatcattcgacatggctctcttctcttcgatagggtcttgctctgtttcctaggctacagtgcagtggcacagtcaagctcattgcagccttgaactcctgggctcaagggatccttctatctcagcctcccaattagctacctgtgcctggctacttttaaaatttttttttagagacagagttttgatttgctccgcaggctggtcttgaactcctggcttcaagccatccttctgccttggcctcccaaagcattgggattacaagtgtgagccactgtgccatgcacaattttctttttctaaggactttttcccctgaagctgaatgtacttttctttttgatcagttccgttgatttttttaaagattttttttaaagattaggttgtcattaaaccattactatatttaattttatttcaaatgtagttgtatgtagttttatttttgtaacttcaagaagtgtgatggatttctgtggagtagtcaaaatacagatattacttacagggtaataagaggtataattttaacttttggtgggagtagtataaatgtcatgtgcattattagttagtcagatgagtaattgtatttgtcatggattgcttctcctcggagacgatgcaaaatatataaactaatggaaaaatgaatgtttcttcttagattatcagacacaatgaaactgactcttgaattgcctcttcccgggggggcatgcccagccccatgccaagttcctctgtcttgcatcagtgtgatgtttgttggtcttccccactgcctgtgatattgctctgtatttataatccccatgtggtgccctgtgcactgtctggcacattgtagatatggtaagtgcttattgaaaaggatttcctatggatctagtaaatgagaaaaccaatttacaaggatactacaggttgtatgatctcactgatgtaaaattctagcaaatgcaaaggaatcttaccaaaagaaaatgagtagggcctggggctgggcaggggtggagggagggtgggctggaatttaagggaatgtgaggaaaggctagggggtgttaggtgctcattgcctttattgtgttggtggcatcacagatgtctctgcagcatatgtcaaaccccatcaaactgtatactttatgtgcaatttattatattgcacctcaataaaactataaagtgaaaatacagaaataagagaaggactccagtttagcctggcttgaatctggtacccacctcaggagtggcccagcgtgagtcaggtgttctgccctggaccagcagctgtgactggaggggcaggtcccagaagaaactggagaagagtcacttcttacataaggattggagcatgctgggcaggtaaccctatcagtgttcactttcaccgtggaaaggataccttgggcattttgtttcgtctcaacatctgccattggactgttgcagaagtaaaaatgacttaaaacagagtggttattagagatactggagaaaacagtttctgggtaaaaatttaaatctctttaaggtctaacagttacacactcttaagaattgtcatctcaaccttggccttcaaagtcacactttctattcaactgtttcctttactgtaatgaattattagcagaaaggatattaagtggacacaactatatcaaataacatttgttggcactgagtgtaacataccaaaacataaacaaatgtgaaattgcattatgatcagcttgttccctagcatattagaagaggttcacatgtttcaaccattaatagcagaactgactttactgccctgtgcctagcctgactgggcagaaggaagttggaacttggtgaaagttactaggagataaaacacctgaattagggtgtctttttcttgtcattttcactggcagttagggatgtgaagtttaaaagtttaaaatttggatataggaccttgagttcacctgtagtggagttaatggaaagggtaaatactgcctcagtgtagaaacaaaaaatgcctatgcttattttcacatttccaatccataggtatacttttaaaagaaattttgaaaccttgatgttttcaatctacacgtgaacttttaaaggagaatttgaagccatgttaaataaatatgaaatcttaaagtatttggaatatctgggagtattcttgaagtatatgaatattatgaaatataaacagaagttgagatttggtccaattagggaaaagcaaattaaaaaacacccagaaaacaaaccaaaaaaatgctctgttttgttgatttaggaacatagaaatagatatttaaaatgtgacctcgagctgttaatttcatcttcattttcctctgtgaaatgggtataatagtgtcttgcattaagtgaggtcgtgtacttcttagtgcctggtatatagtaaatgcacataattattatccactagattaactttttggttgactgagcactggggagattcacggaaagcctcgtggtacatggagggtagtggagaatggaggctttttctgtttttttttttttgtaacttctaaaattctccgggaaatttttcacctcttccatttcttcttcagggactcctgatctgtatattctttttttctagaaaaacagcttgaaatctaggacatataccaaaaataaaaatcataactaaagaaaaatgccatcttagtgtctctgggattgtgatttactttatcaatacaattgaacttttaaggattttcaagtgtatctcaccttctctgatcatattcttgctaacatagtagggtttctgagttcaaatatctgagatgtacgtttgggcctccaaatggagcatgttttcccccagtttttgctttattaatatcaatgcaacaaaatgtttgcatataaatctttacctatatctctatttccttagcatagattcctggaaagggaattactgggtcaaagggtatgaatatttttaacagactcttgatacatattgccaagctgttttctagaaagcttgttctgatttatattcttaaacagcaaggagtgaagctgcccaggtcctggcaccagattccgttattacagacaaaacaagaatagaacacccccaaaacaacacacacggatagcactaccactagcagcagaaacactgctgcaatctgacaagaggaaaatgacttcttactttatttcttagccaaataacacatgcttattatagaaaaccatgtaaatgaaataaagacagtagagacatttgcaattccacctgttgagacatctactgttaactgtgtttacttgttttaattcgctttttttggtaattcgagtggttgaacatttagtttaccagctatttaatttccttttgtatggatttttaaaatattaagaatactagaccattgctgtttgtcttttcaattttttggtctaatatactcacctctttccccaaattgttgttttcatatttttagatgcataggtgttaaaaaatcttatgttgcaaatctgtcaatagttttcttcgtgatttattctgttgcttttttttttttaacatttggaaagttatgttttattcagagatgaaataaatggtatatattcttgtttttaatgttcaaaaattttaaactctgactcgcatgtttctttttctacctttttaatgtttaaaatttttaaactctgactcacatggtgttttgttttatagcataatttgaaggaaagtcttacttgacattcttttcacatagctgattggtgtttatgcatagacattagacagagacagaatattccaggcagatgtaactctggtcagtattcagctacagcatatgttggagaacacagagcagtggatgacccatcttgttgaaagtagggcatgggaaggagaatttaagattggagaaatggattaaagtatacatagggaatgcctttgataccaggttaaaaagttaaaaatttatcgtcagaagtttgagtggctgaattttcttaaaataaacttttttagaattcctttggatgtaagcaatagaaaacttaactctttcccgttgacatcttttccaggttcctagcagtggcccctcacatctccagatttatgttctcttaaatctacctttggaagaaaagagtgcctcttccctgaaattcccttacaaatccagaaattgacctgattggacttattggttcactttggctgtagagaaagtatgatgattggctggaggggatcccatgtctgcctcaaactagtcagcattcttaagggaattcaggtgctctgttaggccaggcctgggttacatgccctccttctggagtcaggaatggaaccccatgagaccatacagtttgaatgttggggaggagaggtttcccaacaaaatcatggtattgaaggtttatcagtcaggttaggctaggttatgctgcagtgacaagcaacaccaaaatcccagtggcttattacagacagctataacaaatcctatttctcactcttgcagagtctactgggggacccccacaactctgcagggcagtcagctccacgtggtggcttagccttccagcctccacttcatgttgtagtgcctgtatcatatctccatgataggcacggtaggagaagggagtgtgcccagctctagaagtgacacatgtctcttctgcctgtgatctgttgtgaccagagctggccagagtcggggtgaggagtggagggaggattatgatcctccccatgtgtctggaaagtggagccaactggatgggagcaagtatgagatggcacagccacactggaggggcccagacacccagtgcccacagccatcgcttaccacaggcagcctttgggacctcggtttgtcagatccatccttcgcaccctcctgtctttatctgactggttcctgggataacgatgagagcaagtaatgcatttggtaaacttttagagctctccagtactgtgtgcctaaggcctgagtgacaggcacatcatatttttttaaaacattaagaataaatattcattgacatcaatcaggccatgaatttctgcttggtgttgtctccacacactgctctgtgacagctctgccaagctctaggcctgtactaagggagagtcatttagcatttctgagcattaaagaagacaaagtacttggcaaaaattgtactttccaagctcacatctttacacagcttaaaaatgtttccttgaataagtggaaagtgtctgacttctgtaccagaatgaggttctgccttctttcatattctctctctgtcaacagtaatgataaaatttagacaagaaatggtatttttctgtgatggccttaaaaaagcaaaacaaaatggagcagccactatggaaaacagtagggcagttcctaaaacaatgaaaaataggattaccatatgattcaagaattccccttctaggtatgcacccaaaaagattggaaacgaggatttgaacagatacttgtatgttcatagcagcattattcataacagccagaaggtagaagcaacccaatggcctgttgattgacaaatggataaacaaaaggtggtttatgtctacaatggactgtgcagccttaggaaggagaggctgacatatgctacaccatggatgaaccttgaggtcattatgcaaaaagacaaagaccatatgactccacttctatgaggttcctagaatagtcagattcatagagacagaaagtggagcggtagttgctgggaaagctggggtgaatgaggagttttttaatgggtacagagtttcagttttgcaagaagaaaagaattctggagctggatggtggtgatggttgcacaaggtgaatgtgcttaataccactgaattgcactcttagcaatggttaacatggtaaactttatgtaatgtatattttgccacaataaaaaacacaaaaaaccagaaccaaaacagaaagcttaccagtttttcctataggttgttcaccacatttcccagtgctctgtgggataagcagacgaaaagctggaagctgctgaaaactggaagtgccaggggctttccagcttgccacactgtgtgctggagggtgcacagctcccagctcagagtggcttgcattggaactgagttttgctcaagctgtggccacagcaacagagctgtctctccatttctttgtactgattgtatagtcttgctgtcatcatccactatgtacaaaggaattcactttctaaattggtacccactcttgtttctcctttgagaaagtgtgtaagtgactagtcaagaggcattcagtttatactttagagtctaaagtttagccagactgtttctgtttttgtgagtggttggcgttctttttcttttgctttgtaattattcatgtttgttcttaacttttcttcctaaagtttgcacggggtgccaagatccctttaagatgctgctcctcgtgttcgaggatgacactttaaacatccaggctttcaggtgatggtgtcatgtgatgtacgtgtctcaggctttcactcccacaggggaattcccatgcagcttttggagatgtgctgaccagtcacgattttttatcatagtagtttttccttgagggcttcacatagtcttctgaggtagcaggaagggagggagactttcttgccaacaccatttctaaatataaacttctaattaagcaggctgtttgaacctcctttggaaaggtcatttgtgaaagtggagcttttgctcattctgtaagcgattccccttcacttgcatcatatggacgatgccacgtggtcgtattcagaaaatatcatcagcaatggcccattgatttatataaggccagaggatcttcagtattagatatcaaagagcttaggtctgccagcttctcctcttccctagaaccagttcttgtgaactacctgactctaagtttcttaaatgtctgtaacagatatgtcttattggcaaaataaaaatgaaagccatggttgttgtggctgggtgcagtggctcacgctggtaaccccagcactttgggagatggaggcaggcggatcacctgaggtcaggagtttgagactagcctggccaacatggtgaaaccctgtctctactaaaaatacaaaaattagccaggcgtggtggtgcacacctgtaatctcagctacttgggaggcagaggcaggagaattgcttgaacttggaaggtggaggttgcagtgagctggcattgtaccactgcactctggcctgggtgacagagcgagacttcattaaaaaaaaaaaaaaggccatggtcgttatctcattgattttgatgaaagaaaaaccaataaagaaatggaactgtcagtgaattgactgtttgggttttcagtaggctcagtcacatctagattgtcagtgtgagtgaaattaatttattggttcatacatgtgccttcataatgacctggaaattctgtgtagggatataaaggcttggttttaataaactaggtgcaatgtgggaacttaattgggagccatgaataggctttaggggatgaatcccatgaaattttctgcaaaatctgcacatgcatggagaggattccgtagcttctgttaggttttgagagggattcagatctcaaagctgttaaggagccttgtgaaatgctcagaatacctcactgtggctgggttggtccctgactggggcctcagtgccctgactggagctgttactatgcaagaggaatgcttcttgaacgtttcaggtggctttttagagtgaatgagtatattatgtgccattcatagtcagaaagaagtgagtagaaaggaaaggggaagctcagaaatgatggattgactttcttttattttaggaaaaaatgcacctgaaagggagttaagaacatagattctggagccaaacttcccaggttcaaatcccagccctgccatttggtgctggtgtatccttagcaaataaagtaatttccatgcatctctagtgtcttcgtttgtgaaatggggataaagtagtatttgcttcctaaggttgtgggaaggattaaatgagagaatgtaaagtcttcttgatagcatgtggtacatggtaagtgcttaataaatattagctgttataatagagtcaggtggttgtccttagtaatgtgaaaagtagtaaaatatggacagttcaggttttatgtacatgtacctatctccaaaaagtcacctgccttcagcatttgtctgcctgtgagccatttcaagaaaattttggtgcataaacatcataaaaggtgaaaaaaaaactgtcatatataattttagcaaaataggatagtctgtgtttttgtcataaaaaattggatgattgtgtttgtcctgttaaatgattaatctgatgagaatatcacatttttttgtcttttgaaatctattgctcagtctttgatcctgaatttcatctaggatatggccatggaggcctcgtcgtctgagatgtcacccttatgatcagtttctccatcatcattaggcctagagaactgctgtctctctctgcattcacctcctggcacatctgataactgtgagatgtcttgccctgttagctttctttcttttttttttctttttgctgttatggatggaaaatgaaaaactgatttctcaacagtgttccatgaaagcaaaaaaaaaaaaaagaaaaaagaaaagactgccaagatgttatcttcagacttcttttataccttcttgaaagtgatgcagttctttgcgcagtgccatgagaactgaaggatgatgtcatagtgatgacttatttcactactgcactatcttaagtaatttcttattctcctgctttcttaatttagtcttttaaaaaatcataggtggcaataattgagaggtaatgatgaaataattctaataataaagcatttcagcatactggaaaaataagatcaccaacatcctctatcacatcttagattttttaaaagcatccagtggactcatggaaattgtaaagtagaatgaatttttgaaaggcttccaagaaaaaaatagaaatcatgaagtagcagtccttacaaatagttagaactgctcaaaaaagaaacccaaacctaacatccagtggaccctgatggtagaaggtagtcacacgtctacaaacccatctgaaggaaatcatctgaaaggtgaagattaacacatgaaggtgctcattgcagtgttatttttattaaataggaaaaaacttaaatgtgtaacatagagtacaggttggacatacctgatctgaaaatctaaaatccacaatgctccaaaatctcaaacttttgcatgctgacatgatagtccaatcactcattggagcattttgaatttcggactttttgattagggagccacgattggtaggtataatgcagatattccaaaatatgaaaaaatcctatatccaaaatggtcctgttcccaaacgttttggataagggatgctcaacctgtagtaggttgattatggcacaccaatatatatgaaagtctcatgtaatagtttgttctcaaaaagtgtaggatcatgattgaatattaaatttagtgagctcaatgcaaacctgtaaatatagtgtgaggttagctatgtaaaatacatacatagaagaatgttggcagcaaatacataaaatgtcagtagtttttttctgggtggtgagatgatgtatgatatttagattttgttaactatacttttactttctaaaatctgcaaatatattttttaaacaaatcttttttgtgatgttgaagcaaatgttcttttcggtagcaaatgttcttttattgaggaataatttatataccatacaattcacccttttaaagtctcccagtggtttttagtacgttcacaagaggtgttcaaccatcaccattggccaggtacagaggtgcatgcctgtaatcccagtactttgggaggctgaggtgggtgggttgcttgagcccaggagtttgagaccagccttggcaacacagggagaccctgtctctacaaaaattacaaaaattagtagggtgtgatggtgtgtgcctgtagtcccagcaactcaggaagctgagttgggtggattgcttgagccctagagattgaggctgcagtgagctgtgattgtgccactgcactccagtctggttaacagagcgagaccttatctcaatcccccaaaaccatcaccaccatcaattttagaacattttcatcaccacaaaaagaaattctgtgcccattagcagtgagcggtcctaggcaaccatgaatctcctttctgtgcctatggatttgtcatttctggacatttcatatgaataggatcatgcaacgtgtggtcttttgtggctggcttccttcaccagcatattttcaaggtgaagcaaatctcttttatagtctagtttactcattttttttctttaggaatcatactaacccttatttattatgtagtataatgtattttttttctttatttccagaattggttccttccattatgagcaacttgttgaatccagatgccattttctcaaacaatgaaatgagcctgtcagacattgaaatctatggcttcgattatgattacaccttggtgttttattcaaagcacctccacacgctgatatttaatgctgcacgggaccttctcatcaatgaacaccgggtaagatcacagggacatttcaggcttctccctccccttttcctcttagaacagccttgagctgacatgaccccaagtctgccacagagaagtcatttaataaattgttgctaaatgaataagtagattttgttcccttccaagtaactcttatctggaagatgatagtttttttaaaaaaagtctttagatgtcttttggcaaaagaccttcccaagatgtgcattagtggagatttggctgtagatatttacactctcgtctttcacagaatgacacggtgtctcctggagcttgatgaattggcagcctgcctgttgaattctggttaggaggaattcctcaaatgataggagatgttttaccttcaacaccaatttgaattgctgagtacagcatatttgaatgtctttcttctgatacgtagtattgttgagagtttttaatgaggaaggaaaaaaagaaaatatgcaaccctatcatttttttctgtagtctgatttgagtacacatttcaggaagcaggaaaagaagtgtcctcagaagtcttgtgggcccgtaccctttgagacccctcccgggaagtacagctcagctctccatctcagacaggtgcatgttgacataggaggtggttctgatttttgggaagttcttccatgggttgaacaattttgccttcatacagctgttaccattgacctcttttcttccttgatttattgcttcacatgtttcttaagcctccttgtgccaagccctgcaatacaagctgggaagataaagatgagtaggagacaggcattgcccgtggagaaccaacagcccagtggggtcgtcggtcacgtgggtagatcagttatgcagcctcctagtggaggtctccttagacattgagtgtgtctgactgtgatggttagaacaactttctctgccttagggaattggggaagcaaagaagaaggtgatatttcagccaaatcttgaaggagttggcagcaaaggagggctgagggtgggtatgagtaacttctaaacccaaattatgcaaactactattttatatttaaccattcgagtaccagacatataatgggctagtgttgtatagaccagccattacgccctctaagacttttcccaagttgattgttcttagctcttttaactgttctcatttgtcctcttttcttttcatcgtcctagtcatcttcctttgtgtgtgctctggtttgtttctctcaaatgtgaggccttgaagatgttaccccaggtggggtctggctagagtggaatagaaggagaccatcacctccctggttctggatgccgtacttttattaatgcagccaaagttctccttagttttggatcctaaccattagattcagcatattttctgatccccctcagctcttagttatctgtggatttaagcagctcattttgtccatatccaaaatgcagtcatggcatttgccaaaaagaagcttcccttctgccactatgccagcagcctgctttctttagttatggccactttactagatgtaaaaccacctagccacttggcatccagcagcaggtctcgtttgttcaagggactactctcttccatctaaactgcggtcctttgcctggatcatgagatgaaagccaactaagaacgaggtggttctgaccttggttcctgcctgccaccccatgccatctgttcactaccccctaaaaggtggatccaaaggggtgttatattggtgctggcatttcagttccaggtcagctgcagtgttttctgtgactttgatgtcatttataaaaagcaagccatgatcccagtggcagtgttcattgattgtccactaggtgctgaaagcacaggttctaaggcctcactgctggggttcaaattctgcctttatcacttagttcctacataatcttgattgactcactcaattcctctggacctcagttttctcccctgtaaaatgggcgtagtaacagtgctttcctcacagtcactgtggtaaatgaattagtaaatgtaaagtagatggcacatagaaaacactcaataaaggttagctatttattaatactaatactattgtttctaatctgtacaacaaccctgcacacacatgttgtctctgtttacagctgaggaaactgaggttcaaaaaattaagctactagatcaaggccacaggccagtaggagacagaaccaggatttgaactcaagtctgtctgtttccaaaggactctattctctcctcgactccatgttgcatctcttatggggttactaacacctttccatcctatggttttttttgttcagatgcaaataaaatattcatgaaaataaaaaatttgtgaacataaaaagtttatgaaatttgaggggaagagagatgaaatagatggataaaataaaagctgcaatcactattatttgaaaagcctctagatttaagatcattgaaatttcattctcattatgtctgtttgttgctttgataaaactatagttataatactaattatatcaggcatattagtagagtcagttatgcttacgcaaatttttctcttctgattaaacaaaataattcttcgaagatgcactgagttcagggccatttttgcagccaagaccgatgcactttgtgtagttgtagaaatggaaagacatcgcttttgagacgcacagtcatagaacagtaaatttgcaatttagtatctctccaaaaagcaaacataaaagcttccagctccttcgtaattaccctttttaaaaaataagcaatttttacaaaaatggaaatttttttaaaaattgagtaataactgtctatattttgattttatttgtccaccgaggaatagaaagggaggggtagagagctcttgatttcatctcccagcttcacaccttagtcagcatttcttctctttagttggcaccattgatcacctgattgttcatatccaaagcattggctgtgaccgctcgcactccgtgtccatgtctgatctctcagcaaatgctatgctctctttttcctttaaataaacttttaggatagttttaggcttacggaaaggttgcaaatactgagttcctgtatgtatacacccaatgcccagtttcctccagtgttaacacttgactaaggtacatttgttacaactaaagaaccaatcttgatacattattattcactgaagtccatacttccttcacatatttttggtttttatcgaatgtccatttcctgctccaggatcccctgcaggacaccacattgcagttagttgtcatgtctctcaggcgcctcttggctttgacagcttctctgactttccttgcttttttaaatgaccctgacagtttcgaagcatgccagttaggtgctatgtgcgttttccttatgattagcctgggttatgggtttgggggaggaagaccacgaggtgaagtgtggttttcatcccatcatagtgagggcctccccagcctcctccagccgtctcctctcctcccctcctgctccttgaacctccaaaccctttcctacttctgccttggagcactctttcttcccccagatgaggcttgctcccggcttgcttccccgcccccgcccacccgcagatttgtgaatgcttgtattgcattttcttttagaacatacactccaaggcgttatattctgtgtgtgtatttgtgtatggtctacccccccaggtagaatgggaactttgcaggggcagacacttttgtcagttctgttcattgctgtattcccaggccctggcacaaagtaggtactcagtaaacatttgacatctgcatccgtgagttctgcaggtaagggagagagttgtgcttcatgtggggccagcgtcctgatgaggtcattttactctagcatagtgttttgtgtggatttcagagagcttagtttttgttcccttctgcgttgcctctaattagatgcgtaatttaggctactttaaatattaaactgagacctctggaaagcaggtatgtttataggcctctggacctcaggaacccacagcagtgttgtaacgtagaggttactagctgtatctgagacctgtaattacccaggactgtaggaaataggcacacatggagaagtcctgggttcgctgctgcattttggtattaactttgcttgaagctatagggacgtttctgtagcattttcagggggacactttgctctttatcagcacacaggaatttgcccagattttaactgggattagaacaaagtcaaggtactaaaggaaaccagactgggcctaaattagaattttaataaaaaccctaagtcaagggctttatcttttatatttctgactgcttttagggataccagttatctccataatacttcaccttgggtgagtctttttattttttcccccttgggtggtgaaaagtttctaaactacgaaaagtcctgaaaatctagctgagaccgttggagaggactgtaaccaactggctgctgtgagcagctctggttcttgggctggatgtcactgttaacaggtgttctactgatgctgtgtgtgtgtgtgttggaaatgggccaatcacgaggatgtttttgactaggctggttgtatggggagattacaatttaggggcaggagtagagcacagaaatcaccctagtcaaaatggttcgactagaagaggccttggagaagacttacctaaagtcatacaggagagtagcaggggctagtagggtggacctaaaaccccaggccgccagttctcaatccagcgaagccactcaattttattgagcacttcccatgtgccaggcactgccctgacttgccacacgcatttttgggctgaatcctttgcaattccaaaaggataggattcttgttatcttttctttgtagatgagaaaaccaaggcttagagggacagacgaccttgcccagggtcacccagctagcacatagcaggaccaggatttgatgcctggtctctcagccccggaacctgtattcttcattatgacatcgtcctgttggcgcttttccagctgcgtctgtcagttttcaagatcattgatatggtttggctgtgtccccacccaaatctcatcttgaattgtagctcccataatccccacgtgtcatgggagggacctggtgggaggcaattgaatcatgggggtgggtttttcctgtgctgttctcacaatagtgaataagtcccaagaaatctaatggtgttataaagccgagttctcctgcacaagctctcttgcctgctgccatgtaagatgtgactttcctccatgattgtgaggtctccccagccatgtggaacactgagtccattaaacctctttcctttataaattacccagtttcaggtatgtgtttatcagcagcgtgagaacggactcatatagtcactcactgtggtctttggaccagataaacattgtgtatttctcaggagtggctccccaagaataacattgagagtgagaggcaagcggaatgtgagtgtgtggagggcatgtcctgctggggagcccagataagcctcattcaaagaaagaaccaccagacttttcagcagtaaacactctcttatttaagtgccagcaatcaactaaaatagttggtgctccactcgtaactgcaaatgctttcagcaaacttgttgaacccctctgaggtggcaggtgctgctgtcacagggaggcgatgagtgtccagtatatagtggctcagagttggttcagaattgattatgtggtggttaggggtggacttgggtgtgacacagacctgggttcaaatactggctcaaccactatctagctgtgtgaccttgggcaaattccttgcccctgatcttcagattattcaatagtaaaataggcttgagatgcctgcttccttcatgctgatgtagtgagggataaagataaagaaagtcatggaaagtgtctagtgtgtggcacatagcatatgctcagtgaaggcaccgctctcagtgacatattaaaatatttctcttctgtctgccctcttattatccatcagtcatgagtttaacaggagattgcagagctgctgaagtcccttggccccccttcagtaagcagatccagggtgccaagcgttgggttctgtgtcagcttgtcaattatgtctgcaaaaatgcaggaccatacacagggttctcaattcttggaaacgcccatgaatggaaatgtcagtttggtgatttcttggcacacatggcaggtagtggataaatgatcccaaatgtgacatttgagttagtgctttgtgcagcttgacttgaaaaattgccacatgcgggtcagcctgctggtcccaggaaatgtttttgtacaaatggaaccctggctatgaaatattagccgctcagccatggaaggaggtttcctgggcacttaatagttgtctgggttttaacttaagcaacttgcatcacagttggaaggtcctagtgatgttgcctctctagactcaggaatagatgttctgtcctgcaggtctatgctccgagggcagaggggcagtggggagagcaggggagaaggccccagcctgattctctgcccaccataccctagtttgtttcattcagaacctctgatgtccctctgaataaaatggggatggtagggcctgccgtgtagtagcagcagaaatggtgcccacagatcagtgccatccacagggtagcttgtgtcctaattctgagatttagggagagaagtaaggacttggatacctggtgcagtagataaggaggagccagcaattttgcatagtgtgaggaatggcttgataataggaaatacccggggaactgggctgctgtattagtttcgttttcatgctgctgataaagacatacccaaggccgggtaatttatagagaaaaagaggtttaatggactcacagttccatgtggctggggagccctcacaatcatgacagaaggtgaaaggcacatcttacattggcagcaggcaagagagagaatgagaaccaagtgaatataaaaccatcagatctcgtgagtatgggggaagccgcccccatcattcagttgtctcccaccaggttcctcccacaacacgtgggaattatgggaactacaattcaagatgagacttggctggggacatagagccaaaccatatctgctgccttcacaactgttctgagacagagtgctggatagtaaccgtaatccatgtgccaaggaagggcctccctaggcctagtgtggggaatgctgtgtctgacagccgtggggttgcccagctggagggtgggcagtggccagctatccagatgagagaagcaatgaaagctctatggagaggctccactctgagaagttttcaccttaaggctctccgtgaaacctggtaatggggccgtccaggggcctgccacatcaaggtgctcacatatgagttgaatggatggttgacaatgagtttgggtaaagctgtgcttccagtattagggggaacattccttttatctgcagcagccttgaagataaaaggagggagtgatgggtggagattgaagccgatgtgttcctggggtcttagggatctgggagtctagggacacaggtaggggagggaaagagaggagagagttgagagaagttggcaggggagagaatgaggcccagcctgtgcttgggcagatggacagggtacagggcaggatggaaggctctggccagcgtgcttgctaggaggcgcttggattggaagcagagggacaagctgtggtctgccccttctgaccccaacctcccactggtgtatcaactacctcagcctttgtacaagggccagatctggacaggatcctgcacttggcacattgttggctaaaaccagttcctttcttctttcttagtatccagcagaaatcaggaagtatgagtatgacccaaattttgcaattcgtggacttcattatgatgtacagcgggtaggtttacttctcctgtttttctatggtttaatgatgtttggaaatgaaatgtactgttggtacttttctttactgaacgggcaaattagttttaaattatgttatttgggactgcagaaccaaatttattcacatatatttggatagaatcttctggaagagactatgtattagaaaagcataaatgcatttagctatttaggaggtactgtttatttctagtagtcattttggtgtttggaggaggaaccagttgccatatctatttttttcccctgtcttttgcagataggccatttctttaaagagctgtacagcacattaattaacaagcaaccctttcaggaatatacagtgtgcttccttgttagggcagcctaatgttgataggatatatgatgacacctggatggctcatgtaatatgcaaatagtcatacattatttacatgtgcatatgtttatgtttttaaaggcagtattaatgaagatcgatgcttttcattatatccagctgggaactgtctacaggtaagagtaagaggagatacatttaatttacgtgaagtaaccaggtgctttgggtttcaggaccctctgactgtttaatgatgaagagggctgcagtgtgaatatgattcattcattcactcacttactcaagagcatttgttgaggcctgctaccatgccaggtgctaagggcttggtgtgccttgatgtcctcaaggagctcagagtgtgggtgggaagtcatgtaagtaaacttgactgcagttcagagtgacagaggtgatgatagaaatgtgctcagaggtcgggagcagtctggaggactggaggaaggactggttttccagagatgctggctggcaagctgagggagggtcctgatgaggagacttggagcaggagggctatgggggtgagggtatagggttctccttcccaccatggtatttgggtggtttggatattgagactttttttttttttttttttttttttgaggtggagtctcgctgtgatgcccaggctgcagtgcaatggcacaatctaggctcactgcagcctctgcctcccagattcaagtgattctcctgcctcagcctcccgattagctgggactacaggcacatgccaccatgcctggctaatttttatatttttagtagagacagggtttcaccatattagccaggctggtcttgaactcctgacctcaagtgatctgcctgcctcaggcttccaaagtgctgggattacaggcatgagtcaccacgcccgggcgtctttgtaacttttaaaatggagaacttggcctttttttattctccaatttgggaggggatttaggagtgtgatttgtatttaggtgcacagcttatacttaaaagtatgtcttagcttacattcttctctcacaaactttgttaaaattaatgcttgtttatttttaaaatcaaagtgaaacatggatagagtcacacagtcaaacaggattaaagatgtcacaggggtcagcagtaatcttctgtgctcccctctgcccctaaaacctttaaagtctttagattttttaagtaatgtgctcattcttctatttcctaatttattaattctggatattgtccctgctgtggtagataaggacttagctttctggcacctcctcccacttctccagtctcattcctctcatctcattcagatctcagtttttggtggttgtactggtcactgtttacattatgactcagaaggtcttgcctggttcactctttttttttttttttgttattgagatggagtctccctcttgttgcccaggctggagtgcagtggcgagatctcggctcactgcaacctctgcctcccaggttcaagtgattctcctgctttagcctcccaaagagctgggattacaggcatgtgccgccacgcccggctagttttgtatttttaaaagagacagggtttcaccatgttggccaggctggtcttgaactcctgatttcaggtgatctgcccgcctcagtctcccaaagtgctgggattataggcgtgagccactgcatccagctgggtcactcttaagccaggtagtgccgtgcgattattttctttcttgtacaatattttgtttttcttagattttaacaataatctcagtttttgtttgcctagttttctgtgtaggtatctctgattttttccaaatagtccattacaaatgttaggcatgtatttattttccaataattcaaatgttttcaataatttgtcactttttaaaaaaaaaattgactctcccctcctggtctgatctggtttggttgcttgtcttgggacttccctttgctactttccctgtttcaaattcccttctcttcctctctctggctttactccctcactttgcttgagtatatcctccagtagcctcctggtgcctccttgtgctgagcctttctgcagcttgtggtggggaatcagttcttgtcatgggtataccccttgcaggcctctgttatcagtgttaagtcaagataccttctttgcatccagtgtttgtcttccagtgtcttgtggaaatgtcttgtctattgatgtctttgctctcatttcctttgactgtttttactgtcactttaatagtgtttcaggatggagaggaggtggtggtgatgatggtaataatattactaatagcgactagcaaatattgagtcttgctatgggacaggcactgttataagggttttgtttaactcattcaatcctcaaaataactatatgaagtaggtactattattagtgccagaggtgttaagtaacttgcccaaggtcacacagcaaataattgcctgggctagaattcagacccaggcagcctgggtccagagtctgtgctcttggccaccatgctgtgtggcctttcttaaggtacaagggatagttggagtccctcaacacatttttttggggggggggtggtaatgaatgaatctattttagtatggacaattacaaataatctttccagcaagatcacatcttgctgtgaaacatggatggagctggaggccattatccttagcaagctaacgcaggaacaggaagccaaatactgcatgttctcacaagtggaagctaaatgatggggactcatggacatatagaggtgaacaatagactctgggatctactggagggtggagggtgggagaagggagaggatcaggaaaaataactaatggatagggtactagggcttagtacatgggtaatgaaatatctacaacaaacccccatgacatgaatttacctatataacaaacctgcacatgtacccctgaacctaaaagttaaaacaaaaaacttttcatgtattttgtaagtaacatgtatattaaatataattaatacatttttgtgcacatgtctcattttcttaggataagtgaaattgccaggtgaatgttgttcattcattttaaggcttttgaaatggctcagtttacctccagattgtaccattcccaacagacttacttttaacttatattttaaagttgttgctacatttaacatattacaatttttagtttttctttctctaaacctcttaaatgagcattcatttgttcccctactcatagctcctaatgttttcccagaattattgttgcagtggtgagggtgggggagagaacgaagaaggcaaggttatgcatgtttatgagaatcctcaccaggtctctctattctgtctctccatctctgtttctgctgttggccccctccatagacacttaccccttctctcctgggttcttggggtttgctgcagggcactccatcctggacattcttgccagactgattccctaaatcattactcccaataatcccctcctctgaatgcctggatggctccctgctctctacagaataaaggctaagccatatgcttaggcttaggtttgagatttttatcaacctgctttaaactcttcgcttcctcttcttccatacacagctccttgacttactagattggtcaagactcttggttgaaagtgactgaaactcaaactggctcagaaactaatggtacagtccacagacagagtgagcttgcaggtgtggctggctccaggggccaaattgctattgtcagaactctttccagctcttggccttcctctctggcttggctcactctcaggcaagcccctccttggtgacccctggcactaccaagcccacatccccccagctccaggtcaagaagaacagaggagctttgtttctccacattccactggagtctcaggactgaatctcatcagaatgacttgagtcatgtgtttggtcttgaaccattatgatgaagagagacaggatgccgggcaggcaaagacagcacagggattcttttcccttgacatcttctttcttgccacctggcatttgctcctgctggtgttctgccagcgtgcagttttccttcctctctgcttcttgaaatcctacccaccctccatggccaacttgtggtgagtcctctgctcaccctctcagcctgaaatgctttctcctctttcttctcctggggttcacaggagaagaattgccttgtttcttgtatatacactgtccattgtgtcaaggagtatggacagtgtatgaggcattcagggagaaggagcgttcagaatgaggctgtagggaagttcactgttgcatcgctgctgagaagggtgttgaggtgagctggactctggagggagtgtgtggactcgagtcactcacgcttcctgggtgcgaaccccagctccatggctcacacgtgtgtggtcttgagcaatctctggaccctctgaaagccttggtttcctcctgtaaagcaggcatgattccagtgcctgcctaaggggcagctggtgaagatgaagcatacctgcacagggcccagaatatagggtggtgctgctgggcttcgtgcctcacatcacggggtttagtccactgagccttgcgtgtggccatttccactcttagcaccactcagagaagagtattacagggcaggaggatgtctgatggagacaaaaacagcctttctctgccctaatgtgttaaatacatttaaaaaaaatgccagcctgtctgggcactgtggctcgtgcctgtaatcccagcactttgggaggctgaggcaggtagatcacgaggtcaggagatcaagaccatcctggctaacatggtgaaaccccgtctctcctaaaaatgcaaaaattagccgggcgtggtggtgggtgcctgtagtcccagctactcgggaggctgaggcaggagaatggcgtgaacctgggaggtggagcttgcagtgagctgagatcgtgacactgcactccagcctgggcgacagagcaagactccgtctcaaaaaaaaaaaaaaaaaaaaaaaaaaaagcccaccccaaagcaagtcattaggaagtcttgtaccttagtggtttaattaagatcctgggcatgcagaaatgtcacttttcttctctttcacaccagaaggggccatgaatgagagaaggtgggaagaaagtgtccctttctaagggacgctttgtttctaagcaaagtgtctcagcctagtttgtttctaagccctgatgcaggtccccagtccctacaccagggtgaattttatgatgtttggcccacaggagtgagtgctgccagctggggaagtggaggggggttccgtactgcagcctcatttttgtacctatagtttaagtttttactaggaaccttgtgaaaagctggggtggttcctttcacagccacactagtgaagcctctctatagtgcttacatagaccaactgttctatacgtggtagctcctgtgatcttctcagtgacatcaggaaataggcacttttatagttctctgctttaagaatgaagactttgagacccaaaagggataaattacttatcaaggtaatatccctagtgatgaagggagcgggaattggaagccctggcagactcattcagatctgtgctcctaacctcgtgtttctcatgcagagctggggaaaaggagcttccacttcgatttcaacgctggttgaggctgcattcagatgtggccgggcaatctgcccatgcctgctgcagttgtgtttggctcttcattcgatgcagctgcttcttggggaattcagctggcagatttcactgcgtcttctgagccgccatttggttgcttggctcttgtggatgcagcctgggtggctgtgcctgtgccttagaggcagcagtggcttccaaagggcagggaaataactctgacccggctgaatcacttgactttttatattttctctccagtgttagagccttagcagtgtggacacatgactgctgctactcagcaagggctgatttccaaggtcactgcctcgaatgatctggcttagtgccagtgtcttatcttatttctggagcaaagataaagggagtccggtgtttctgttttttcaaaggccagtagttgtaacaggttaatcaagatgagaggcaaaatattaatgaatccactcagataactttttaaagtaatgtgggtgatggagacgggaggaaagaggttgaagtgatctttttgttaacgttacatatcaaaacataaatgatatcgtacataggttttactgtggaccatgtggttttgtatgctaagcaacctgttgtgttagtaactgaaattcttcttgaattatttatactcctgttgtagcacagcgtgacatttcctgtactattcagtctgttgtttcgtaatcattggtgtctatttctcaagcactttctcctccacaggaggggtggaggagcaggtgtttcccctcctgacgcttgagagtggatgagtccaggtgaataggtgaaggcacctgctgtagtcactggtggcagaagcaggagtgaaatcctggccactgacttcacaaatctttttttttttttggtatgtggaggaggtggattcatttgcagattccagaggcaggcagatggtagatgaggaaactggccttcagtgtcacaaagcattcagggtcatttcctctccaaggtggtggtgccacagggcttcctgcctcatgtcacggggtttagtccactgagcgttgggtgtggcaattcccattctcagcacctgtattagtctgttctcacatacccgagactgggtaatttataaagaaaaagaggcttaatggactcatagttccacatagcgggggaggcctcacaatcatggcagaaggcgaaaggcatgctttacatggtggcaggcaagagagtatgagagccaagtgaaaggggaaactcctaataaaatcatcagatttcgtgagacttattcactgccatgagaatagcatgggggaaacagctccggtgattcagtgttctcccaccaggtccctcccacaatctgggaattataggagctacaattcaagatgagatttaggtggggacgcagccaaaccaagtcagcccctatctcaggctagagtattggagggcaggaggatgtctgatggagacaaaaacaatctttctctgccctaatgtattaaatacattaaaacaaaagccagcccaccccaaagcaagtcattaggaagccttgtgctttagtggtgtgagagcctggaccatagagccagaaagcctgggttctaatcttgacctaccacttcctactttggtgtgcttgaacaggtacatgacctttctttgcttcagttacctcagctggaaatgggaagaataatggtgcctccctcctaggattgttgagaattacaggaatgactaggtgtaattcatatctggcctatagtacatgccatgtaatattaactattattattcctgctcttgttaccaatagaacagtagtagtagtaaacatagtagcatcttacctgatatttgtggcatttacttgtggcacattttgcctcgtcatgatgacagtgccttgcacctcaattgaaaaatcccagcactgcacaggggtgtgaaaatcattggtttctctagttgagctctttaactgcaccatctggtttttccagaggcctcagtgttgtccctgatgaagaagtcattgaaatgtacgaggggtcccacgtgcccttggagcagatgagtgacttttacggaaaggtaatgagaagcactttattcatttaaagcagcctttttccttcttgaaacatggccttgtcgaacttacctactgcttatatggaattgacagggaaatttgagattgtgtgttgagagagactagcgtttgaaggggacacccccagattctttcatgattctcctttctgaagcacttcctccccacctgatgaaggctcttttcacctcccacatacctaccccatttgccaccccatctccaggaatgtccctagtttctggagtggggctccagaacagattggggctgtcggtgtgacagctactgcttcccctgacgaatggctgtgaaatgccagagttgatggctacacagccaccctttttaccttcagggaaacctctgcttttctatcttttgtggttctctttccactcagaatttttgcttcttgtcttactagatgcactcacttacttgctttgtcaaaatgaaatggacgatgctcggtcagctagtaaacttagtacagacagcccctgacttacaatgattctacttagaattttttgactttacaatggtgtaaaaccatcgcaatttcaacataaattacagtattcaataaattatatgagacactcaacaccttattataaaacaggctttgcataggctaatataaatgttctgagaatgcttaagataggctaggctgagccatgatgtttggtaggttagatgtataaatgcatcttttacagtgggtttatcagaatgtaaccccatcataagttgagaatctatagtgtaaatcgcaagtattcagagaagggctcttttttaagctcaaatgtgggccgtgaggttcgtgctccagttcaggagaattacatgagttttaatgtcattatgggcaataatttgtttgctggctttcctctgtgtttcctgagtgtgaaccggaaatgggagtgagcacaggagaaattgggaggggaagggtgattagactctgggggaaatcagggcatttcttttgatatcctagttatacttagagtgagacatcagctctgctgtgaatgataaggaacaaggggaacattttactttttttttttttttttaaggcagagttttgctcttgttgtccaggctggtgtgcagtggcgccatctccgctcattgcaacctccacctcttgggttcaagcgattctcctgcctcagcctcctgagtagctgggattcaggcacccaccaccatgcccagcaaatttttgtattttttagtagagacggggtttcacgatgttgtccaggctgatcttgaactcctgacctcagctgatccacctgccttggcctcccaaagtgctgggattacaggcttgagccaccacgctcagcccattgtccttttttattattagaactttccttttttgtgttgatgatgggatctcgtttagtcacggaaaaggcttcctgctgttcctggtgcttcgtggctctgtcccttgcgtgggcccctgtttctaaagcattccttccaccctgtctgcagagctctcatggaaacacgatgaagcagttcatggacatcttctccctgcccgagatgaccctcctgtcctgcgtgaatgaatacttcctcaagaacaacatcgactatgagcctgtgcatctgtacaaagatgtcaaggttgtatccacagtgagagattacagtgctgagtctgtttcagccttttcagtgggagtcacagagtcttgaacctcctttctaggttaggtgttttaaatagtctcttagctgggaactcttatatgtggtttaaccttgaacattacaagaaagatgttgttacatcaggagaattggaaatcagtcaaaagttttgttaaaacgagatggtgctgacactgttatctcaatttttgatcctttctgaccagaaggccaaggccagggccggtgcacttggccaaagggatgatggggatggaagtccagcctgtacctactcacccatgagtctgcccgagcaagggtgcctcttcttttttttttgaacagagtcttgctctgtcactcaggctggagtgcagtggcgtgatcttggctcactgcaacctctgcctcccgggcctcccgggttcaagtgattctcctgcctcagcctcccaagtagctgggattacaggcgcctgccaccacgcctggctaatttttgtatttttaatagagacgaggtttcaccatgttggccaggctagtctccaactcctaacctcaagtgatcctcccacctcagcctcccaaagtactgggattaaaggcttgagccaccacgcccggccagggtgcctcttcgtcacatgggttacattcaagctcctggctggggggcctgtgccactgtagttgcccagaagggatgcctttttcctttgcctacaaaggttccatgtggctctctaaagtcctgcaaaagtcatgcaagaatccagttgggggacgggggatgtagacaaatgtaaatgtttacgtgagcatatacaaagtcctcacttactgttgcccataggatcttggcatccgtgactttaagtgaaaccgtgtgcaacaggtccttgaataacgccaatttattcgatgtcattttagttttgacaaggaaaaaaattgattttgctttatgtcgtttcacatagagttgcagtttctaagaacctactgaagatgttaaggacttactgtacaaatcatttgtatttataaatttatgtattttatggtcacatgtttatatatttatatatgttctttaagctgtatgaactttttagtactaaaaaagtttatattattttgtatgtatttacatagttataacatatttataaaaatatgtgtttatttaaatatattttttaaagatacatatttacacattaaaatatttttgttatatatttataagtaaatgtaagttttggcagcgtgaatcctgggttttaggaagatagaggataaattatagtttctcaatatcagtgtggtattatccaaattgaatttaggtatttagtttctgttctcttttttgtgtatacactttgtctttaaaaatctgtaagaatcacttgtagcagccttgtgcattcataaggcgagatgttgatttgaaagctcagtttttactgcaagtgttgctaccaccaagagcaaatacttgtgtagagcttagtaggtcctaggcactgttcttatgagtgctttaggcatgttaacttactaaatcttcataataatataaggtaggcactattcttaccattttacaaataaggacatcgaggcacagtgaggttgagttgcttgcccaaggtcacacagctggtaaatagcagagccttgattttaagccaggcagtctgacttgcatttaactgctgccttctgctgctggtgtgaaattgaatcaggcttgtgctgaaaggtaattgaggttgagattgcagtccagaagtgctcactcttaacagaaatctcccagcaacagtctaaggcttagacacaattttgcctgcagccctgtctcctgctactggctctagaaagtttccataggcctctaggaatgtcaccacgtagaggccctgtgcagtgtcacctgccagtgggaccctgttttgacacctgccagctatcatgctgccatactcctgaacccacaaagggtttaaccacctcctcttcctctccctggaccacatctctgcctgagctacaatctcattgccagttcgttgccctgctggtggtaccaaagagagaaggaggaacttgtaagctatttgtctctgcctctcattctgtgttatagaatttgccgttggggtctagggacagaaagggcacaaagataaaagagcaataactccctttgtccagatggccagggatcatttgttcacagtactggatataaattactgtctatcatgtgggactttattcagaattattcacagaaattacctcttccaagcactcttttgaaaattgcattggaaattgccaccatcaccatggaaactttggctttcacaaggggctgcctatgaaaatggaccagaattggctgggtgtggtggctcatgcctgcaatcccagcactttgggcggctgaggcaggtggattacttgaggccaggagttggagaccagcctggccaacatggtgaaaccctgtctctattaaaaacacaaaaattagcctgatgtgctggcgggcgcctgtaatcccaactactctggaggctgaggcagaagaatcacttgaacccaggaggcagaggctgcattgagctgagatgggaccactgcacttcagcctgggtgatataacaagactctgtctcaaaaaaaaaaaaaaaagaagaagaaaatggaccagaatttagattttgtgtagggcctggattgtcagactttctagggacagaagttaccatgactgccatttcacttgtactgttactcaggctatctcagttgtattttcgctgattaaaaatgtatcttttggcaggattcaattcgagacgtccacatcaaaggaataatgtacagagcaattgaagcagacattggtatgtgctcagcagtatcacgaagatagtttcagcctttctgtttcttttgcaaccatgccggcattttactttgcattccaggtgctaagcagaggctgcatgagtgctctgtaaggacctggcatcctggcatgttagccgtctcctctttgtcctggaacttgacataattctgacttaaaaggagaggcactggcagctatagccacttagttgtttccacttagaccgaggaggcagggtctttgtgaatgatgcaccagatgtacccgtgttccaccggacaaagcttcttccttagggcctttattccctttcctgtgcctaggacagtgctggacccaaacccccatttagaaagtacttgcagattgacaaatatcatgctgaatctgtgtgtgaatttttctcttgctcttagaaaagtacatctgctatgctgagcagacccgcgcagtgttggccaaactggctgatcatggcaagaagatgtttctcatcaccaatagccccagtagctttgtgtaagttgctctgtgtttcattgctagcttctggcacactccttgtatcccatttgttttagcagctggaaattggaaagaaaaagttacagacacagttaatctctttaatgttagactaacctggctgacttgttgccctagggacaaagggatgagttatatcgttgggaaagactggagggacctgttcgatgtggtcattgttcaggctgagaagccaaacttctttaatgataagcggaggtgagtgtttatttttctaggggactagattttattcctttgctgctgtgaatatatagatggtgtgtcttggtaaaatccagttgcaaaatcataagcatgtgagattatagcttttgaattttaacccttctagcaagtaatcatgaggagagtgacatgagcacgtaacagacagtttgcatgcattgaaagggttctcagttcaacttgagctacttcagacccatgaggtaggcttgaagaaaatgattggcagtgatgagaaagccaaacttattatcacgtagtaaattagatctttagatgcagacacattgtgaagcatcagaaaacaacagcagcaacaaaactgcctgttgggtagctctgtaaatagagctctcattagtgtgtttaaaattgcagttggattttgcagagctgctctgcaacacaggttttgcatcacgtgcagtaaatctctattacgtcttaatatcttcctgccactgtagccgtgggaatggggaagcaggtaagttttaggttgtgacagggacagagtgtgctgttagtatttagtgggtagggatcagggaacgctaaaatatcttttaacttgtgggacaggcctgttcaccaagagctgttctccacaaattcccacagtgttgagaatcactgcactagggttctaaaaaaattacttgtatttgtataataatgggcaagttttgaaacacttttacccccatgtttattctgcagctggtaagcaggtagtctgttcctctctgttaggtgatttgaagcatcagggtgtggtgccctgcagttaatgctttaaattcctcttgtcccagttttccacgtgtcacagtgactccaggaagaagaggcaaaccaagaaccatgtgcagggactcaaaaatgcttggtgggactcaagaaaatgagtgtgatgaaaaacagctataaactgtggcttgctgctttgttactattttgtcccactgactggcggctggagtcatcccaaagacagtggcaagggagttcctacatgggagagccgcaaaccgtcccatgatggggctggttgggattccaaagaaagaagcactaaactctggggtgatcagtgcaaagcgcttattagaggaaccgacttacagagtgggctgctgtgcatcctatggcacagggtccccaacctttttggcaccaggggccggtttcatggacgacaatttttccagcaggtttgtgggggtagggtgatggtgtcaggatgaaactgttctacctgagatcatcaggcattagattctcataaggagcacacaacttagatcccttgcttgtgcagctcacgatagggttccgctcctttgagaatctaatgccaccactgatttgccaggagttggagctcaggcggtaatgctctctcacccactggacgctcgcctcctgctgtgcggcccggttcctaacagaccttggactggttttggtctgtggtccgcggcccagggtttggggacccctgctctggcagacaggagagaaagggatgttctacctaggtgtgtccaccaggagtgggtcaggatgtggagtttattgagggtttaaggaatttggctccaggccagggctggtttcttccagtgtcttggggagtatcataaaaacctttatcggtgtctgggagttttgaagcatgcagaggaaaacatgcacctagctgggtcagagtggtcaaaggcactcctgtcctagaggaagaagtgggggaggttgggggccctacagtagctgatatgatgccctcaccattttcttagtggattctggggtgtggtcaggagaagggccctgtctctcttttcaccagagagctcctctgctttgttatgtttataaaaagtgagggggcagggtcctggactcgtttccctggatggcgcaggcagggtgtctcagccctctcccccaaacatctattttgtctttgttcttgaagcctagggtaagagctgaataattctccatctgtattcatccttgtgttattcataataatgagaggtcagaaacaacctaacagccctacagtaggagatgcctagttaaatttggaatagccatgtgagggggtattatgcagtcattaaaaatgatgtacttggccgggtgcggtggctcacgcctataatcccagcactttgggaggctgaggcgggcggatcacaaggtcaggagatggagaccatcctggctaacacggtgaaaccccctctctactaaaaatacaaaaaattagcccggcatggtggtgggcgcttgtagtcccagctactcgggagggtgaggcaggagaatggcgtgaacctgggaggcagagcttgcagtgagccgaggtcatgccactgcactccagcctgggcgacagagtgagactccatctcaaaaaaaaaaaaaaaaaaaaaagatgtacttgggccggggtgccgtggctcacacctataatcccagcactttgggaggctgaagccagaggattgcttgagcccaggagtttgagaccaccctgggctacatagggagactgtctctacaaataattaaaaaattagttggtcacacctgtagtcccagcactttgggagactgaggtgggcagatcacctgaggtcaggagttcaacatggtgaaatcccatttctactaaaaatacaaaaattagccagtcatggtggcatgcaactgtaatcccagctactcagtaggctgaggcaggagagtcacttgaacccaggaggcagagcttgcagtgagccaaggttgcaccactgcactccagcctgggcgacagagtgggactctctctcaaaaaaataaaataaaataaaataaactaggtatggcagtgcatgcttgcagtcccagctatttgagagactgaggtgggagtgtcacctgaacccaggaggtcaagactgtagtgagccgcgattgtgccattgcacttcatcctggggaacagagtgagaccctttctccaaaaaaaccaaaaatgtatttgggaaaaaaaaaagatgatgttgtattactgtaaaacatgatgtatttaagaagatgtaatcacttgggaaattgctcgcaatattagagaaaaaggatataaattagtgtacacaaagtgatcctcattttatagtcatgaaagaaagataaatttcataaaaagactgaaacacgaactgaaatgttaagtgtacatggtgggtctagaattctgggttgcgtacctttttttcatagtatttttctgtattacaattaggtaaaaaaattatttttttagggtgacacttatttttaccttaaggcaaacaaactgtgagtcctttgggctaacactgccagggtgaggcatgaggcattatccttacttcccaatttccaccataaactagtgcttctggtcttctgatttgttttttatctggagtggcttaatttcaggtacaaagccagaaaaatatactaaggcagtatttccataaacttttcttcataaacaggttttctgcctggtcaagtaaatccgggaaatctgggtgaaagaaagttgattacagcagggcttttcagagccatcaatagctttttaagagggacatgtttagtgcatggtgttttccaaatttatatgaccctggaattcttttttttgtttgtttttgtttttgtttttgagatggagtttctctcttgttgcccaggctgaagtgcagtggcacaatctccactcactgcaagctctgcctcctgggttcaagcgattctcctgcctcagcctgttgagtagctgggattacaggtgcccgccaccatgctcagctaatttttgtatttttagtagagatggggtttcatcatgttggccaggctgatctcgaactcctgacctcaggtgattcacctgccttggcttcccaaagtgctgggcttacaagagtgagctactgcgcccagccccctggaattcttttttttcgtggaacacctttggatactgggcttcacacaatttgggacgcattgaattaggccagggaatatgatggtggagttttggtttcgggttttttttaggtttttgcagggagctacttcctgtgatagtgaataactggtatttcatagagcagacagcctgtactactccatgtcataatgtttcccatttctgttgttaggcctttccgaaagatgaatgagaaaggtgtcttactctgggataaaatccataagttgcagaaaggccagatatacaagcaggtatctcatgaccagctgatcctttttgttgctttgctttgtggtcggtaataatgctaatagctgatgttcattgtggcttactgtatgcctggcacagttctgagtgattcccatgaactgattgattataacttggtggtaaacttaggtttaaatcaatatattttcaatatattgctagtatctaactcaaaattgaatgtttttttaaaaacaaaatttaaggcatgactttcatagtgtgtaacatataagatgccagtagtaaaccttggaaatttctctttaaggaacacttactcatggcatattattcactcaaattactaattattttctgacaatacatgttttgtacacaattttgtgagtttaaaaaaaaatttattaagacaaggtcttgccctgttgtccaggctggagtgcagtggcatgaacatgattcactatagcctcaacctcctgagttgaagtgatccttccatctcagcctcccaggtggctgggatcataggcatgcaccaccacacccagctaatttttaatttttattttttgtagagacagggtcttgccattttgcccaagctggtcttgaactcttgggctcaagcagtcctcccaccttggcctcccaaagtgctgggattacaggcataaccatcacacctagcctgtgcacagttctaatatattttggtgtcatatgaggctttcaaatatttgaatgaattattgcatcggtgaccattattatgttactaaagttcattttttaaaaatatgaatacattcttggtgggtatataacaatctgatggatttggcaataagtgtattttctaggccttgaaaaattagctttgataaagccattctacttctaggaagttagcctaagaaaattatgaagataatagctaatacaacttggctatgagaatgtttatcatgaagttgcttataaaatagataatgtcagctgtccaacatcagggaattggcgaaaggaatcatggtacttcccagctgctatcattacatggtagactattgacatgggaagatggccacagcatgttaagtgtggaaagatagttacagtgaggtgtatataatataaatccttcttgaacagtgcatttgacatagaagaaagatttcccatgaaggtgcttttatctttatattttgatatttaaaataagttataaaaacaacaatttttaaaagttttatattttgtactgtgggttagacagatctctatctgtaataataataactatagttttctctgattacagggtaatttatatgaatttttgaagcttactggatggagaggatccagagtgttgtattttggtgaccatatatacagtgacctggcggtgaggggcccttttttcctttgttgggggacagatgtgttagtctcacttactaaagaatgtatcttttatttaaggatgtaccttttatttaagaatatatcttttatttaaggtcatctttatgctttcataaaacctaaaagtaggctgcatttttttaatgtcttttttttttttttaacagaacaggatggatcagagttgtgaaaaagataaatattttttggaaatgatggaaataagttcactcagagtttatcagaataatctttccatttaaataataagaaataaatgccattgttctttttcctttcatcgatgcatcaaaaaacataaaatccacctttgaaagtttgccaccgttgggaatatttaaaagaatgtgctgtaggttttcatgtattattaggaggaagagaaatattcaaaggcttcaagaaactgaaccagtgggctgggcatggtggctcacacctgtagtcctagcactttgggaggccgaggtgggtggattacttaagctcaggagtttgagatcaacctgggcagcgttgtgaaaccctgtctctactaaaaatacaaaaattatctgggcgtggtagcacacgcctgtaatcccagctactggggaggctgaggcaggagaattgcttgaacctgggaggtggaaactgcagtgagctgagatcatgccattgcactctagcctaggcgacagagtgagaccctgcctcaaaaaaaaaaaaaaaaaaatcaaaccagtgaggaaggtgggcatcctaagccctcttagactcttgcataggacttaggattctggctttagctgagtagccagactgaacctttaaaactataaatcagctaccacttcttttaaaacctgaaagcctttctttctctctctgagtaaaagcctgagttcctatggttgcccactggatttccccttccccagcccacctctgaagacatcctctgcctctgccccctgttttgtctcttctaggttccctgacttgttgcttcttaacatgccaccctccagcatgttcctgccccagggcctttgcacttgctgttcttcagccagaatctttctgtttccacatattttcatactttcccccaccttgtccttgtattagcctggtcttcctaactaccctgtataaaatggaaacctccttgcttcctctccttatcctgttattctgcttgatttttgtcccttgtacttatccccacctgccattgtgtattttacttatttattgtctgtattttccacgagggctgggatttctcagtttttttgtgcattgttttatcctcagtatttagggcctggcaaatagtagtgcttgataaatatttgccaaataagaaaatgcacatttagtatgatgactatatgtcttagattttccaggacatagctgatactagatattctggcctgttgtcaaatatggggtgacagcatttggaatggaaaatgtgatcatgcatgcttatgttgtatgtgatcattccaaatctgagattccatggttctccataacccagagggcctggcacacacaggtctgtggatgaattgaatgaagacctttggtagcatttaggtcaagcccctttctgcccctgacctcatttttttttttttttttttttttttttttacagaccatggttaatgattccagacctagtgtttctgcaggggttgtgactcacggcaattatttccagaactgaaactttcttggaatgaaatgatcaaaggctggggccaaataggttttaattaaatgtaattcattgaattcagcttggtgaataactaaccattaccatcaaaaagtaattaaatgaatgcctctcatgtctgggaaaataatgacatagtttagattctgttgagactgacgttgacttttcgtgatctttgtgatcaggatttgaccctaaagcatggctggaggactggtgcaatcatcccagagttgagatctgagctcaaaatcatgaacacggagcaatacattcaaaccatgacctggctgcagaccttgactggcttattggaacagatgcaggtttggatatattatttttctctctcactttttctttaagcctgaggttagaaagttacttcaggtattttctgcttaattgttataaaatatgaggcttaagttgttttcagtagactgtagaataacgattggggttcttttgcctagacagtgtttgtggggcctttgttaatgcaggtgtttgctcacattcctctgtcagtgaagatccagtgtcctcacttccacactgaagcctgctaggagctctcctgtgggatgctgggattcaggaagccctgccagtgcttgagtctgtgctggttctgtctgcacctgctacggtgggacttctccattctgggcctcagtttccccatctgtgaaataaaggggccgctggaacgaaaacttcagtctaggcaccatggcttactggaaagagtctcaaagcaagagtcaagatccctgggtccagcctcagttgattctgaggataatacctgcagtttgctggcttactggagttccctggcagttacttccttaagttaagttaggcagccagttttggctggtaagtgaggaatggcagttttatcagtcgtttcctggcccatggaagctgcctctcttttgtagctgtatccccttaattctccatgtgcccctttcctttccagttccatgaggcaccttgctttctccctggctccagcttgcctgggctacagccgtctcagcatgggtgctgacatttttaggatctgggcacaggtgcttgctctcttggctaacacacctgcaacctgtggccacagcctattgcccatgcctgccctctggctttggaaatgggcagggaattgccttgcctgccccagctggcactctgcttgggagtggctgagcagtgagatcaggcagggccatgagtggcaggccagattctggctccaggtgcatgcattccagagcatggggccctgcacgtccccctgggccttgtttccaggatgcactgggctccattagttcttggctcttctctgatgagaatcctctgatgaggatttattctgtttccctcgctatgcttgtctgtgagatgatttactaaaaatatacagtgtcaattctgagttagtgtagtttagagtctgtgcatgtcatacactactaatagttactttttatgtgctggacactgtgctgagtgctggctctatacactttgctcatttaatagtcacagctgtcccttgcaggtaggtacaattttcccattttagaataaggaaacagtttttgagaggttaggtatcattcatgtctgaggtcataaaatggcagggcagggcttgaaccaagtccccaagtccatgcttcagagcactgctctaatgtgccttcctgtttagaggattcgggtataggcaaggcttgactcaccctcagtgaaatctctgtgaccctggcagctggtcataggtacaaacacaactgcacgtagatggtatcagtatattttagctttggaaagaggttttttttttttttggttttattttgttttcctttttctgacctgtgtaaaaagttgactactaaggaatgtgtgttttagagaatggaagtgctgaaaatatttctgtggtttgtaaaattaattatatgaggtgtggggtaagggaaggaagaaaagggagttgaggtttacatagctgcccccattttgcaggagagaaaactgagacagcgagataggtgacttttctagaatcacagttctcggttggcagaatcaggctatgtagaaatgtcgtaagaacttaccgtgttctggacactgagacctttaagttcatttcatcttcacagaaactctttgaagtagttctgaaacatcactgccattttactgatgaagaccctgaggcgcagaggagatataacttgctctagtgaggggtgatgctggtgtttacacacaggccgaccgactctagacccttaacctctgtgcacctatattgattgccttgggttctggcactttgtacagagttctgtcaggttggattcactaggatatagaggtgtatagctgctaactaaaaaaacatccaaatcagtgtcctatctcactgtcaccctcttcctcagtgttcccttagaaagttataagttattccactgagcctgtggtagatgtttctagaactcccccttggggattattttcagagcatgtagcacattatttggacagttttctgaggagaaaaattggtcctctgagattgggtttgattttttcagagccagtagagtgtcatttttttgtttgtttgtttgtttgtttttgagatggagtcttgctctgtcgcccaggctggagtgcagtggcgcgatcttggctcactgcagccttcacctcccaggttcaagcagttctcctctctcagcctcccaagtagctgggactacaggcttgtgccaccacgcccagctaattttgtatttttagtagagatggggtttcaccatgttagccaggctggtctcaaactcctgacctcacagagtgtcatttggagccgagtctcatgaatgaaatagaagtatataaattttggttgtaatttcattagttagccttgaagtgcattccaaaatggctgtggttcatggtggtggtgctggcattggtagccgcttctcaggtaaccaaccagtcagaggccacatttagaccacaggtcagcaagcttctgcaaagggccacatggtaaatattttaggctgtgcaggctgtaggctctgttgcagctacccacctctgcacttgtagcacaaaagcagccgtggacagtatgtgaatgaatggttgtagctgtgtcccaataaactttattggtggacactgaaatttgactttcatgtaatttttacatgttaggaaattcttctcttttttttcttttgaggcagtctcactctgttgcccaggctggagtgcagtggcatgatctcagctcactgcagcctctgcctcccaggctcaagtgattctcatgcctaccctcctgagtagctaggattacaggtgtgcaccagcatgcccagctaatttttgtatttttgaagagactgggtttcaccatgttggccgggctggtctcgaactcctggcctcaagtgatccacctgccttggcctcccaaaatgctgggattataggcgtgagctaccacgcccagcctgtcatgaaattattcttcttttgagttttttttcccccaaccattgaaaaagaaaaacccatttgtaagcttataggctgatagaaaaatgggccggtggctggactgatgtaggctattgcactggctagattgtaatatctttctcaaacaagggcaaagatatgtagccaatctgttttgcccctaaagagctgattatgcccatgaacaaccactggagatggagatggctgaagtgcctgtaggatcagttctctgtggggcttcggttagtcttttccaatgttaagtacccactctagagtgcatggtttcacttgaaagattaatgatagctaatgaacacacactgtctttgaaatattttaaagtggatttcagaaccagaggctcttgttttatggagtttggccttgtagggggacagagctggagaaagggggttgggcaccaggagaaatcttcttttttcaatgggagagacttgagcatgtttaatggctgatgggaaggatgcaggcgagagggctgttcctatgagagagatgataaatggtgggaaaggttcatggcagggcagccagcagggcgccccagccagctgctgggtgcttcgtgggaggtaaggcccgaagggtggccgagtgaaggcgcagagctcagggtccccctctgggcatgcgtccctggcctctgattcctggggtctttctcctttacatgtcccttcaacagcctcagggttcagagtcaagctgttgaactgggcagatgtgataaacagaaggttcttggctcccatgtcaaaagcagatggtttgcccgcttggtgttttcctccaggttctaaggttacccctgtggtcatgaattgcagggagctggcctgttccctgcgatcatgtgcaccttggattctggcctcagtgtttctgtttagccataagaaccttggagagggacttgtgagattccatttgttagatcatgggcaattggcattttctttttgcctttcgcccatattttggcccaccagaaaatgctctgctcttccttctcattgaggtgatttgccttcttgccttttgcaaaaaataattgtttttttaaattaaacacttaatataatattaaattaaaaggtttatttataattctactacccctgtacaaattaaaacaaatttttatgttaatttccaaatgtaagcacatactttgacatgcttgcaattggtgggtatatacgccatttctacttaactataacgtttgtacacatgtatataatatgtataataggtagcatgtactaagtatttgtacattatagtttgtacacatgtatataatatatgtgtaatggatgtatcatgtgcataatggatatatcacatacatgtgttatacatacatggatacacatgcattatgtttatatgtaatctttactgataggttaataacttcataatacatcttaatttgttaaaccacatttctaatgttggacatttaaaacaattttttattcatgaagaaggcagggtttcaactggaaggtctgaaaaatgtattatttcattcaggtgccagcctctgagatgtaagggaataaaatttctcctagaaaaactgctcattaaaaaattctcattacgtaatgagcttatttgaaatcaaaacagttgtaataattgacttgtgtcctacaggttcacagagatgctgagtcacagctggttttgcaggagtggaaaaaggaaaggaaggagatgcggtaagagaggcctgtattgaatgtgcgcgtccaccaccctgttctggctgtgctcagcccacatgtgttccccagggccagcctgaggcataatgttgaaacatcctattttagctcccaggtatgtctgcctcccccaggatccagaatcagctacctgctgttggtaacatgtgacaaatttccttgaggccagccatcacccctgtcattcctccgcccttgccatcgaaggcctttggagaacggagccttcccatctcattcctccttcctgcctgcctgaccttcccatctgggcagctggtgggccagttgttaataatgctggcagcaccatgtggctactgggcagcactggatttgggctctgaaccctcaatgaattcttagggctcctacgaccctggtgcttatttgtaaccacagctatttcaagaatgtgcaatcagtaagcaggatgttaactgataaagaaagcctgcctgccataagaaaagtttggtgggtgtctgtcttaagggaacccatactgacaatcatgcttccctagaaggatgctttataccacttgcatgaacttttctgactttgtgcatggctttcttcagccgctgggtatagccgtctctgagctttggaaacagtggttactgtgggattctggcctctcagcagtgggcagcctgactccagggttcatgtggtggtgtgcgtgggtgggtggatggggcatggagagggggcagtgagtccattcctcagattctgcagaagccaaagctgtattgcatttagtttgtcctcctccctctcagagtgttggctgtctgagtcttattctaactgctaccaactaactagtggcttttatcacacagctgtgtaaatgattatattttttgctgtgtttgtaaatgacttattagcagtcaaatagaattcattcattttaatggaatactctgtgtgtagggtcccagccatcagagagagtgcacatcctgtgtttgtatgatagggatgttgatatagatatacatgcccgtaaggatgactgcagggggttatggggcttggatggggtgaacagcctcacttccgaggaggctgggaggcattgaagtatgtaatggttgggggagatttacatcacataaaacaatctttaattcctccatctgagcacttgagagtttacaacatgcttttattttgcttaccttactcagttctcacaataaccttgtaaaacggggtcttgatcctttcggtaagggaagtggagcctcctgagagcattccgtattcctctgtgtaccatcgggagcagctgttgcatcctgtgtttaggtttgggagatggggcgtgtgtatttagagaagcttgcaaaagaatctggagccttgagacagttaagggggaaatgtgaccagagtcgttttgatggatggataggcaggctgttttcttttcttttcttttctttttttgagatagggtctcattctgtcacccaggctggagtgcagtggcacagtcacagctcactgcagcctcaaccacccaggctcaagtgattctccgacttcagcctcctgagtagctggaactacagacatatgccaccatgcctggtcaaattttttgcatttttgtagagacaaggtctcactatgttgcccatgctggtgggccagggcgcaagtgatccacctgccatgcccaggccagactgttttttttgtttgtttgtttttgtttttgtgagacggagtttcgctctgttgcccaggctggagtgcagtggcatgatctctgcttactgcaccctctgcctccctggttcaagtgattcttgtgcctcagcctcctgtgtagctgggattacaggtgtgcgccaccacgcctggccaatttttgtatttttaatagagacggggtttcaccatgttggccaggctggtctcgaactcctggcctcaagtgatctgcctgccttggcctccccaagtgctgggattacagatgtgagccaccacacctggctctaggctgttttcttaattaatatttggggctgctctaggctaacatgtttctcaaatgagtcctattttttttttttaaaaaaagaagtgattttgatttcagtagtttaaaaacaaggatttttgaatcattctctgttgctttgcttttttattgcctcttcagagaaatgaccaagagtttcttcaatgcccagtttggaagcctgttccgcacagaccagaacccaacctacttcctaaggcgcctgtcgcgcttcgctgacatctacatggcgtctctgagctgcctcctgaactatgacgtcagccacactttctacccccggaggactccactgcagcacgaactgcccgcctggtcagaaaggccccccaccttcggaacccctctcctgcaggaggcccaggccaagtagccaagggcaaaaactagaaactgtaactgcccctgattgggcaggcatgatggggttgacttcatgtgggtctgagtgttgcttttggaaaagatacagataagccttttgatatttattttgtaccttacggagaataattctcccaatggttaagacaggagctagcagcccacccctccagcctttccccccatgcagggctgaaaggcaagcttcacattggaactctgattttgcctttttgtttactgaggtcctggaacatcaggtttcctgggataggtgagaccacttgatgccatgtctgtattctagcaggtcaagcttgaaacggttcttgactcctccatggaacatttcctgaacatttacgggctatgcattgggaactgcaggggcacagtgatgggcaaagattagctgcttccagaaggctgatttcgtgggctccacaatggtaaaacgctgctgtgagtggcagagaggttccccaggtgatggccagttcccaaatcatttggtactaaggctttgacattctggcacatcacatcaaatagaacacagcctccctggaaggacttaagtgagaaagaacaagagaagctgcaactcctggacccttttgtcctcagtgtgtggttcctgcgtccttccccagggcaggagagaggagatgagagctctggtcaaaacctgccagctagtggaacagccttctatagagccttctgcaagaaacgagtgggtttgaagaaccaaaacatttgtggtaggtctcccaggagcttgttaaacctggaaacaccacctgagttggtttcatctgctcattggaagaaagaaaatgaaccaggaaaaagcatctttgtcatgaaatgctatgccatgccacccacccagttgaattggaatcctgttaaaacatgagatttaccagaaacagtcctttgtctagatggaaacaaacaagatcctggcttctctctaatgagttaccaactgagaggtgcttggattggccaggggaggaggaagatggccaccacaacttagccatgtccagccttctcttagatttcactcctgtgatgtttgtgcgactatttgggagtttgtatagtttgtttttttttttttgttttgttttgtttttttttagatgtctaagatgggaaagggcgaaggacattgaagctaaggaatagatatgacctagctaaccaagcttttctcatttctttctgttttgttttgttgagatggagttttgctcttattgcccaggctggagtgcagtggcacaatctcagctcactgcaacctctgcctcccgggttcaagcgattctcctgcctcagcctcccaagtagctgggattacaggcatgcactaccacacccagctaattttgtatttctagtagagatggggtttctccatggtggtcaggctggtctcgaactcctgacctcagataatctgcccgccttggcctcccaaattgctgggattacaggtgtgagccaccgcacctggcctgcttttttcatttctttctaggggcaatgcaagtggcatgtattccttttgttggagggaagaatccttaattgcacctgcatttgtagtatccttcaatgtaaagtgcatatttactgcactctctgagtgctatgggaatgtctgctgttattagttatggggctgctaatactgttttaattgcatatgctatatcaatacttctgttcagattagcctgatctagtattgctaaaactcattttaagcttttgcggtaacttgtatatattcttaaatctaaaggatggcaggaacatgaggggagcttgtggagagtgcttgcttattcaacatttttattgtgataaatgtatgtaaccatctattgatgaaatccaagtctggcattccatgggctccttgccagatggcagaaacttaatgagttatatagcatcctttgtaatgctgcttgttatagttggaatgtacttgtgatatttggctgtatttaactataatggtgaaggtgaccctttagatccaataaggcttctccccatcttttcttctacattttgttatgaacacagtaaggcacagtagtatgttctttttttggaacagggtaggcattttgtttattgtttgcttgcttctaggtgttttcgccatcagggtgtattggaggctgacacttaatgggtgtgtgttacgcccagaactgctcggtgtcggggttctaaaagaatgcgctggtgttcttggcttcaagtttctgctttggagaagcagattcaggaagtaggtgttgcttaaaaataattcttggtttttatctaatcagatattcattgattacctaccaggtgccagttatagggtgttttgtttactcaagaatgaagtagaactatttttaaaacctgtttccatgagtgttcacgttaggtgacctaagctttgaaggagaaaaacatttttgggtatgaataatgagttttgtaatcaattcccagttagaagaatttcagtctctgggccattgagcttggcagtgttgagatctcccatgtgacagaagcctgacatctgggccaccaaggctcactgactgtgtaccttgcagactgtagacccatgtcgtggcggtaacggggccaaacacagtcattcccatgtgaacgatggaggcacatcccactttattattaatccttgtatatactcagtcaggacagattttaacttgtcgctgtcatgactttttttttttttttttgaggcaaggtctcgctctgttgcccattctggagtgcagtggtgtgatctcggctcactgcaacctcttgcctcccaggttcaagcaattttcgtgcctcagcctcccgagtagctgggactactggtacatgccaccaggcctggccaagttttgtagttttaatagagatggggtttcaccatgttggccaggctggtctcaaactcctagcctcaagtgttctgcccacctcagccttccaaagtgctgggattctgggtgtgagccactgtcatgcctggcctcgtcatgactcttttctctttttttttttttttttttttgagatttagttttgctctttttgcccaggccggagtgcaatggcacgatcttggctcactccaacctccgcctcctgggttcaagtgattctcctgcctcagcctcccgagtagctgggattacaggtgcccaccaccacatccagctaatttttttgtatttttagtagagacggggtttcaccatgttggccaggctggtctcgaactcctgaccttgggtaatccacctgccttggcctcccaaggtgctgggattacaggcatgagccaccgtgcccagcctatcatgactcaactgggatctggcacactgcactgggtgttttgttctctgatgtgcacattgatgaatgcatattggtacaagggaaacgaatctgttttcagccatttaaaaaattgtgttgtaaagcaaacaaaaatagcttgaacatttaaaaattactgtttaatattgtttgactgattttctaagaattatgtgaacaatgatgagtccagggcagcagccatcacaaatatgacagtccagcaaggcccatggaggtccctttggaagggacttgcacagctgattttctttttccagtgttgtttttacgggtgaaacgtggcttttgaaatactttagttgtttggcttagagctcccactttccccctaacatagtgcctgtctgttttttaaaacattttacccttcggcactattttctgctattcccattaatattatgtaacataaaccacttgctactgatttgggcatattacagactacaattactagttgctttgaatgcattggcactcttaattattgcaaaggagaattgaaaagtagtcttgtggtcctagttaatttagctttgggcaaactaagtggcttttcttctgtcctcttctcaaaaggccttttaagcagcagagactgggctaaatactggaactgaattccacttttctgcctgctcatttgctgccaaagaccacttggggctccttgtctagaatgctctaagacgaaatttggccagacacagggttccttgattgttctgttcaactaatagagaacctacattttgccttcttaatatcgactttcttttgtaccaggtttttctttctttcttttttgccttaggagcttagctcaaagttcagctaacctttgacactactagtgtcatttagtaacagtaatctttgacactactagtgtcatttaggagcttagctcaaagttcagctaacctttgacactgctagtgcgttcaagaaagggtagggaatgaagtacccttaatgcagggtcagcaaacttttcctgtaaaaggccagataggaagtatttttggctttttgggctgtttgcttttgctactactactgtgggaatgaccatggtcatggctgtgttccagcacaacttgatttaccaagacaagctgtgggctgtatttggtcctcaggctgtggcttgctagcccctgctctaatggattgtgttggcggcaatggcaagattcccttgctgagaacatgcagatgaataaccttatagctgggatgcagagaggagaaagttctgtaggtaataagtgcactgtattccctctgagctacttcctgggcatagttacatgtatggccagtgtgtgtacttgagccatcaggctcagacacttgttgaatatacctctcattgcattagtttgtaattgtgctagtgctgggtgctgagctcagctgcccggatgacctttccagactgaaggacatactcccctaacagctgggagtgctgctggctggccatttacttccagcccttatgaggagtttcccctgctgaagagccctgcctgccccagatcatacccccttcctgcctgtaacccttaccggctccatatggggtacaaagggctggcctcctcaccccaacttgggaaaccctctggggccatcccagctccagagccccttgtggggtcagtgagacctcattgtggccacattacagcccagtgcctctccctgacaagcctgtacccagccggctcagcccacagcactgtcctatgaaccttcctgcacgccattctccacctcagtatctgctttcggggaacccaacctgcgacagtgcttctgtgtgttttcagtcctgcaggtttgaactctgactttggagacttttccagttatctcgtggaatgacagattgtgcctgtatgatatcaggcacaattaatgcaaattaggcagacctatttattctagatgtgaatttgctatttattttaaatgttgattttatgtgttatgtgactctgaacttattgccaaataaaagtttgaattgtatcatctggtttattgtcagtcacctattttgtgtgcttaagtctgccacgttaaattctgatgaatccacagtatcgttttctaaaaaggcatttttttccaggacttgaggttatttctacaaaaatagataaaggagatcttggattaaaaaaaattctaagggacttcaaaaagtttatccctgagagaagggataaccttttttggggaaagctcaaaggtttcttctcactacccccatctccccccacccacagcaagcacacccacttgttttcagagcttgaagactgtcattcctcccatggatatcttttttttcctcccttcgatcacctgcctttgtgtacctgtgatggtgggtgttggtggactcactagcaaatctgtcccatattgattttttgggggcgattttctggaaacttggcatgtcatctaagaggaaatgacagcctgctcctctgcctgaaatatgggctgcttctctttcctggagttgtgaatgagcttataagacacttggggcttccagaactttgggcttggctcagcagaaatcccgacgatgtggaatgcagttatttgggcagtgaaggcagcagagaggagagcctgagctcagctcaacccagcctttccctccgtccccagtggtgattcccaaccttggccagcagtgccccctggggacaatttggagatgtggggagaggtgggttgcagggtgcttgggttttgcagtgatggggaggggatgtctagtattttgagggcagggaccaggcatgttagaccccctgcattgtaagggagagcccagtacactgaagcatggtcccctgtctacacataaatctacgtgatacaattcatgtaggtggaaacatgtttataattttctaagcctagaaactcttttataggtaaccacaaaaaatttttgtgacataattttaacatactgaattttccaggaatgcagctatatgtaaaccaaaggaagattttgacttcatcttattcagagctttataaggaattgttcgtcatttcagaagagcacatcctccacaggaggccactcctggtatttgagtcgtgaatcacacccgtgtcagtctgcatttctactggtcatttccatgaagattatatagacacacgtatgtaagactgtacttactgtctgagtccattcatgctgctataacaaaataccatatgctgatttagcttataaacaacagaaatttacttctcactgcccaggaggctggcaagtccaagatcaaggtgccggcagatttggtgtctggtgaggcctgtttcctggttcacagatggtgacttctacatggtagataggttgagggagctctctgaggcctctattataagggcactaatccctttcaggatgcccctcccccttaatcacctcccaaaggcttacaggctcacttaccaccctcctagtgttatcaccttgggggtaaagatttcaacacaggaattttgggggtcacaaacattcagaccatagcacttaacctttattttaaaatgtcagccaggtgcagtggctcatgcttgtaatcctagcacttagggaggccaaggtgggaggattgcttgagctcaggaatttgagaccagcctgggtaacatagtgaaaccccatctctacaaaaaataaaccacattagttgggtttggtgatgggtgcctatagcagcagctacttgggaggctgaggctggaggatcacttgagcccagaaggttgaggcttcagtgagccatgattgagctactgcaatccagtctgggtgacagagtgagaccctgtctcaaaaaaaaaaaaagtcaattatttaaaaactcattagtcaaatattttctaagatccaaatttgttttaagcaattataattgtcttcattgtgtcttctattggaattgtagctgagattttaccaagtatgtattttattgtaagttactttgtctttctgttatagaacattatatatacatttctaattcttcactcatttattttttaatgacaggtttacatgtatagctttaaaaggcaaatctaagcatacttccttaaagatgcattataaactgttttctttcagtgaatggaagtgtagaatattacactgattaaaaaaaatcgtgtgaggataggccatgttttctatgaattacttttcatgtcgccaaggagcaggtgctctgggtcaagaactgcagatttagagaaactgcctcgtggctgcacatccatgcaggcccctccaggaagtcctgccgagaggctgagcctgcctgccccaatccttcgcattactttcctcctcagcaaaaatatcaggtatgggaagttgaggcaaattgtcatccctggtcactcctctcacatgccttttcttctaaggtaattctagcaattaacaagctaacacatttgtcgttaaaaatgtttcagaatttctttgtaagtagttgggtgaggtgatcttttcctccctgctcgtaagacaagaagagatgttgggtagaggctcagtccatatatctttctgaatagctgcgcctctggcgttagtggcagtcagctggggtggccaacagctgtagcctcccaccctgcatcctgggtccaccagctgggcagtaacaaggagcctggaccatgagaggggcagttgtctgcatgggtcccactgacccggcactcctccaagctccatttgcctagggcctgctctgtgccctgcgctgttctggaactggacatagcaaagaccctgctccatgcagggcacgtgtgttggggacggagttttccgctggtgtttgcctcagggctcaggagtggggaaccaagttgtcaagaggtgggaaggggaagtaattcaacactagtgcactgcaccccatgctgagggcctgctggggattggctcatattacctcatgtgacaggctacagtgcaaaataatttgtgccccaggagtttcaggaacactaacaagggcacacagttattgcgagaagttggttgggtgggcctgagtaggctaagcccatctgggtgatcccccatcccctttgcctgtgccagtggaatgtggcatcttcagactctagggcaagtttgtgtgtgtgtgttggggggaagggcatttctaggaaagaaagttcctcactgttctgagccagctcctatgagaggctctctcctgagtgtaacactctatggaactgacaaagccactttatcccctcgaggaaatctgctgtaggtgcactcagagggcagcgtgggaagacactgggtcttcgatgatgtcttcgaggctctgagtggaatcaaccctgaggctgccctcttctgggtcttccagtaacagctaacagtaaacctgccgtgctgtctaagctaatgtggagttgtgttttcgggtcctcagtctgctacggtaaggcctgcatacagttgatacttcatcctcaacaaacttgtgatgttgaagtttttcccttaactattaagtaagggagcctacagttgaacctgtttcttctggttgtaaatctcaggtgtttctacagaaggtattctctctctttccctctctctctctctctctcactccctctccctctctctccctctctccccctttccctctccctccctccccctccccctccctctctctccctccgcctccctccctctccccctctccctctctctcccatctctccatctttcccnnnnnnnnnnnnnnnnnnnnnnnnnnnnnnnnnnnnnnnnnnnnnnnnnnnnnnnnnnnnnnnnnnnnnnnnnnnnnnnnnnnnnnnnnnnnnnnnnnnnnnnnnnnnnnnnnnnnnnnnnnnnnnnnnnnnnnnnnnnnnnnnnnnnnnnnnnnnnnnnnnnnnnnnnnnnnnnnnnnnnnnnnnnnnnnnnnnnnnnnnnnnnnnnnnnnnnnnnnnnnnnnnnnnnnnnnnnnnnnnnnnnnnnnnnnnnnnnnnnnnnnnnnnnnnnnnnnnnnnnnnnnnnnnnnnnnnnnnnnnnnnnnnnnnnnnnnnnnnnnnnnnnnnnnnnnnnnnnnnnnnnnnnnnnnnnnnnnnnnnnnnnnnnnnnnnnnnnnnnnnnnnnnnnnnnnnnnnnnnnnnnnnnnnnnnnnnnnnnnnnnnnnnnnnnnnnnnnnnnnnnnnnnnnnnnnnnnnnnnnnnnnnnnnnnnnnnnnnnnnnnnnnnnnnnnnnnnnnnnnnnnnnnnnnnnnnnnnnnnnnnnnnnnnnnnnnnnnnnnnnnnnnnnnnnnnnnnnnnnnnnnnnnnnnnnnnnnnnnnnnnnnnnnnnnnnnnnnnnntccccctccctaccccaagtttgtatgaaaccctgcttgtgataacacaattttttcaaactttctttttttggatggagtcttactctgtcacccaggctggagtgcagtggcaggatcttggctcactgcaacctccgcctctcaggttcaagcgattctcctgcctcagcctcctgagtagctggaactacaggtgtgcaccaccacgccaggctaatttttgtagttttagtagagacagggtttcaccatgtcggccaggctggtcttgaactcctgatctcaggtgattcacctgcctgggcctcccagagtgctgggattataggcatgagccactgcacctggccattttcaaactttttaatgggctgtagtatcccaagtgttaaattttttttttttttttttttttgagaaggagtcttgctctgttgcccaggctggagtgcagtggtgtgatctcagctcactgcaacctctgcctcctgggttcaagctattctcttgcctcagccttgtgagtagctggaattacaggtccgtgctaccatgcccagctattattttttttttgtatttttagtagagacggggtttcaccatgttagtcaggctggtctcgaactcctgacctcgtgatccgtccatctcagcctcccaaagtgctgggattacaggcatgagccaccatgcccgacctcaagtgttaattttaactgtgcctaacacctggctaatacccaggccaaggtttccctttgccttctgaaggaaggggtctcggtgcaaatcaatcactcttgcagtgtgtccaaatgggaggggcatcttcaacattctttggcaggttaattgtatttaaaagaccccaaagccagctcacctgtaatatttggaaagatgatgtattatttagttatcatgtcttctttgagatataactaacaaacagcataccatgaaattcactgttttaaagtgtacaatttcgtgtttcttagtatattcataaggtagtacgaccgtcactgctatcgaattcctcatcatccaaaaaagaaaccccatacccattagcagtcactcctcattcccctggcaatcaacctactttctgtctctatcaatcatcaatttgcctattttagccatttcatataaatggaatcatatgatatgtggtcctttgtgactggcttcttaatgttttcaaggttcatctgaactattgcatgtatcagtacttcattttttagggctaaatgttttattgtttggaataccacagcttcatttatttttcagctgatggacattcgagttgtttccatttttttggcttttatgaataatgctactgtgaagatgcatgtacaagtttttgtacggacatatcttgatttctgtctcttggatatatacctaggggtggcatttttgggtcatatggtaactctgtgtttaacttatttttttgccaaactgttttctacagtggctgtactattttggattcccaccagcaatgtatgagggttctattttctccacatcctttccaatacgtgttactgttttgattctagccatcctcgtgggtgtgaagtgacatctcattatgattatcatgtcttcttaaagaagcaaacacaaccaaattcagaagaatttataaggctggtgtctgattgattgaaaaggccccaggaagtggattttgccttcagagttcaactcctcctctggtgcagtcccaaaacactaggtttgttctgttgactttgtttctgttccataaacctttattgtgcacagttcctgtgtcaggcactgggctaggggctgggatacaaagacggaggcttacaatctaacagggaagaaagatcacagttacccatcatgtagggcagaatggagcaggtgccagctgaagagtacaaaggaagaagagccaaagggtcagaggaggaagctgtactgggtgggcacagcaacacatctctcacccacagaaacaacccccagatcagccagagagatgaggtatggcttctgagtgcttaaaggactttacgttcctaaaaggcaactggtgctgagaattcacagttgatggcccaggtggcagtgagtgatggctggcatctcccgtccaggccctcacagtgtcctcaaggggtcattgccctcaagctgccgttcttcagagtcctggaaaagagagggttgtaagggggcagggcattctgtgtgttgagtcctagttgaatctttctggtggccactggtctgaggcatgactctccctgagcactgtgaacacgtatgtgctgggcgtgtttgtttgtgctgctgccttgtgttgggaggcaggatgggctgggggtagggccacctgttttagtctctcctgcttgaagctgggtggcccaagacaaatcatcccaactcggctgcagtttcttcatctacaaagggtcataatatacctcacagggaggtaggaggattaaattagagcctacatttagcaaggtataagcacctcacaaaaggtggctaataatattataaaaactcctttcggtttgaaaattcatcttgaaccagtggtggctcttgagtgcctgagagagtgtaatagaaaccccgctcagccgggcatggtggctcgcgcctgtaatcccagcacttcgggaggctgaggcaggcggatcacttgagctcaggagttcgagatcagcctgagcaacacggtgaaaccttatctctacaaaaaatacaaaaattaggtggcacatgcctgtaggcccagctactcgggaggctgaggtgggaggatcacctgaggcttgcagtgagccctgatggtgccgctgcactccagcctgcgtgacacaccaggaccctgcctaaaaaaggccacactctagaggtggccatgccaagccttctgctgactttagctctgactggcacccaggctttgtcaattagcataatagatgctagaaatggcttttcatgggtaaaactagtggtggtaaatgtgtctggagtcactaaaaatagtgtcaaaggcgtgagaatgtagcacgtcactttgtaagctggtaccttatgcttaggattctggaatgtttttgccatgtagtctgaatagtaggtttagctgaatcctgcatttaggctactttctcacctgcctcaggtaaatctttcatgcatggtgctgatagagccctcagaaggggacagacaacagggaaggcatggggtgcattggagaggatgtatgcatttgtttctgctttttaaatgaaggtgatttcagcataacagtacttagttaacaaatgtaatttagctgaacttaccacctccctttttttttttttttttttttttttgagacagagtcttgctctgctgcccaagctggagtgcagtggtgcaatctctgctcactgcaacctccgcctcccagttcaagcgattctgttgcctcagcctcccgtgtagctgggattacaggcaggcaccaccgctcctgcctaatttagtagacatgggatttcaccatgttggccaggctggtcttgaactcttgacctcaggtgatccacctgccttggcctccgaaagtgctgggattacacgcatgagccactgcacccggcccgaacttacccttgaaatgtgaaccagaagcctttacatgggtttgattaaaaaaatatgatttgcaatctggttatttttcagtctattgcatttatattaaatctgttaccacaggcatgaagaaccacaagatatttaccttgatttactttggaaaaataatatctgttacactatacaaacttcaacatggtggaagaaaacatttctctccttttataaaaagaaaaattaagttctattcctatgtatttttttcagtcgagaactggtattaaactacaggcaggatgtacttccacatgtgttatgtatggggtaccctgccaaggggtccccctggattgatgtcagtggaggccccagctaagctaaagcatcactgactctagagataaatggtccccttctgaaagaccagagcagaacacccacccatatatactataaggcctcatcaaagaaaagtagctccaaaagcaagaaagcagcagctctgacaacaagcagtaaaatcttggacaacaatgtcagtgtaagtaagtttaaaggacatctaaggccagatgcagtggctcacgcctgtaatcccagcactttgggaggccgaggtgggcgtatcacctgaggttgggagttcgagaccagcctgaccaacatggagaaaccctgtctgtattaacaatacaaagttagctgggcatggtggtatgcgcctgtaatcccagctactcgggaggcagaggttgcaatgagccgagatcgtgccactgcactccagcctgggtgacagagtgagactccatctcaaagaaaaaaaaaaaaggacatctaaaggaaaaatcctttttccatcttgttttgcacctgctacctcataaatgattgcagcagaattcagcccaagactttttttcactgtggcatctcacctggtcatgagattgggcttggataacaacctcttgttctcgcctgtctctgtttgttcaaggattctgctgtctacccaagagaacccaggaactctgagcaaccacactggcttcagtcagcttgcaaaactggcttttaggcttgttacctgacatacattctagaaatgaaccttctttggtacaaagatctccactgaaatttcctaaaagacatcattcccctgtaccccaagggaacctattcctagataagaatgcaaactcaccgtgaaggggtcgtaggaaggttctgggggagctgaggttgtgctctcatacaaggggttcgagatattctcaggctgctgcttgccaagagctgcaacattaatgtcctcttccgactgtttggaaagacaagcatgaaagccaggagcatccccaaagcaggagcgtctcagccaagttggcaggtaaagcaagccaccctttgcctctgggagcttttccttttttaacagtactttgttgagagatgattcacatataataaaatttaccaacctttagattcagctcagtgacatcttaccgatgtctgcccatttgtgatcaccaccaaatcggcacatagggcatttccataccccaggatgtgttcacatgctcttagcctgctggtgcctgccacccagggtaactgctgttctgactcccatcaccctgaagtggtgttgcctatcctttaacttaatataaatgcagtcatacagcctatacacttttgctaaaaatggggattttgagattttccctggagcttataaatatacaagctgtctgccagaaggcagcaaactgctgcttgggggctctgcaccacagcctttaccaggagtgttttgaggagagggtgggccagagaggaggacaaagtccataaggaaagatgctcaaccgctgtgctgctgccccggccatattcttaca

SEQ ID NO: 218 - DNA, 1702 bp, Homo sapiens
gcgggtagatcttgggccgggcagcagcagtcgcagagcggcgcggcggcggtggcggcagcaggcagcaggcatgaccatggcagcggcggcggtggtggcacgcggggccggggcgagggcagcgacagcggcggctttgcggggtggctgcgggaccgcggctcgggggcggccgtgtgcgggccccgcccggcccttgtgcactgcacccgggaccgccccggacatgaagcgctacctgtgggagcgctaccgggaggcgaagagaagcacagaagaattggttccttccattatgagcaacttgttgaatccagatgccattttctcaaacaatgaaatgagcctgtcagacattgaaatctatggcttcgattatgattacaccttggtgttttattcaaagcacctccacacgctgatatttaatgctgcacgggaccttctcatcaatgaacaccggtatccagcagaaatcaggaagtatgagtatgacccaaattttgcaattcgtggacttcattatgatgtacagcgggtagtattaatgaagatcgatgcttttcattatatccagctgggaactgtctacagaggcctcagtgttgtccctgatgaagaagtcattgaaatgtacgaggggtcccacgtgcccttggagcagatgagtgacttttacggaaagagctctcatggaaacacgatgaagcagttcatggacatcttctccctgcccgagatgaccctcctgtcctgcgtgaatgaatacttcctcaagaacaacatcgactatgagcctgtgcatctgtacaaagatgtcaaggattcaattcgagacgtccacatcaaaggaataatgtacagagcaattgaagcagacattgaaaagtacatctgctatgctgagcagacccgcgcagtgttggccaaactggctgatcatggcaagaagatgtttctcatcaccaatagccccagtagctttgtggacaaagggatgagttatatcgttgggaaagactggagggacctgttcgatgtggtcattgttcaggctgagaagccaaacttctttaatgataagcggaggcctttccgaaagatgaatgagaaaggtgtcttactctgggataaaatccataagttgcagaaaggccagatatacaagcagggtaatttatatgaatttttgaagcttactggatggagaggatccagagtgttgtattttggtgaccatatatacagtgacctggcggatttgaccctaaagcatggctggaggactggtgcaatcatcccagagttgagatctgagctcaaaatcatgaacacggagcaatacattcaaaccatgacctggctgcagaccttgactggcttattggaacagatgcaggttcacagagatgctgagtcacagctggttttgcaggagtggaaaaaggaaaggaaggagatgcgtttcttcaatgcccagtttggaagcctgttccgcacagaccagaacccaacctacttcctaaggcgcctgtcgcgcttcgctgacatctacatggcgtctctgagctgcctcctgaactatgacgtcagccacactttctacccccggaggactccactgcagcacgaactgcccgcctggtcagaaaggccccccaccttcggaacccctctcctgcaggaggcccaggccaag

SEQ ID NO: 219 - protein, 537 aa, Homo sapiens
MTMAAAAVVRAGARAATAAALRGGCGTARRPCAGPARPLCTAPGTAPDMKRYLWERYREAKRSTEELVPSIMSNLLNPDAIFSNNEMSLSDIEIYGFDYDYTLVFYSKHLHTLIFNAARDLLINEHRYPAEIRKYEYDPNFAIRGLHYDVQRVVLMKIDAFHYIQLGTVYRGLSVVPDEEVIEMYEGSHVPLEQMSDFYGKSSHGNTMKQFMDIFSLPEMTLLSCVNEYFLKNNIDYEPVHLYKDVKDSIRDVHIKGIMYRAIEADIEKYICYAEQTRAVLAKLADHGKKMFLITNSPSSFVDKGMSYIVGKDWRDLFDVVIVQAEKPNFFNDKRRPFRKMNEKGVLLWDKIHKLQKGQIYKQGNLYEFLKLTGWRGSRVLYFGDHIYSDLADLTLKHGWRTGAIIPELRSELKIMNTEQYIQTMTWLQTLTGLLEQMQVHRDAESQLVLQEWKKERKEMRFFNAQFGSLFRTDQNPTYFLRRLSRFADIYMASLSCLLNYDVSHTFYPRRTPLQHELPAWSPPTFGTPLLQEAQAK

SEQ ID NO: 220 - DNA, 7236 bp, Homo sapiens
gcgggtagatcttgggccgggcagcagcagtcgcagagcggcgcggcggcggtggcggcagcaggcagcaggcatgaccatggcagcggcggcggtggtggcacgcggggccggggcgagggcagcgacagcggcggctttgcggggtggctgcgggaccgcggctcgggggcggccgtgtgcgggccccgcccggcccttgtgcactgcacccgggaccgccccggacatgaagcgctacctgtgggagcgctaccgggaggcgaagagaagcacagaagaattggttccttccattatgagcaacttgttgaatccagatgccattttctcaaacaatgaaatgagcctgtcagacattgaaatctatggcttcgattatgattacaccttggtgttttattcaaagcacctccacacgctgatatttaatgctgcacgggaccttctcatcaatgaacaccggtatccagcagaaatcaggaagtatgagtatgacccaaattttgcaattcgtggacttcattatgatgtacagcgggcagtattaatgaagatcgatgcttttcattatatccagctgggaactgtctacagaggcctcagtgttgtccctgatgaagaagtcattgaaatgtacgaggggtcccacgtgcccttggagcagatgagtgacttttacggaaagagctctcatggaaacacgatgaagcagttcatggacatcttctccctgcccgagatgaccctcctgtcctgcgtgaatgaatacttcctcaagaacaacatcgactatgagcctgtgcatctgtacaaagatgtcaaggattcaattcgagacgtccacatcaaaggaataatgtacagagcaattgaagcagacattgaaaagtacatctgctatgctgagcagacccgcgcagtgttggccaaactggctgatcatggcaagaagatgtttctcatcaccaatagccccagtagctttgtggacaaagggatgagttatatcgttgggaaagactggagggacctgttcgatgtggtcattgttcaggctgagaagccaaacttctttaatgataagcggaggcctttccgaaagatgaatgagaaaggtgtcttactctgggataaaatccataagttgcagaaaggccagatatacaagcagggtaatttatatgaatttttgaagcttactggatggagaggatccagagtgttgtattttggtgaccatatatacagtgacctggcggatttgaccctaaagcatggctggaggactggtgcaatcatcccagagttgagatctgagctcaaaatcatgaacacggagcaatacattcaaaccatgacctggctgcagaccttgactggcttattggaacagatgcaggttcacagagatgctgagtcacagctggttttgcaggagtggaaaaaggaaaggaaggagatgcgagaaatgaccaagagtttcttcaatgcccagtttggaagcctgttccgcacagaccagaacccaacctacttcctaaggcgcctgtcgcgcttcgctgacatctacatggcgtctctgagctgcctcctgaactatgacgtcagccacactttctacccccggaggactccactgcagcacgaactgcccgcctggtcagaaaggccccccaccttcggaacccctctcctgcaggaggcccaggccaagtagccaagggcaaaaactagaaactgtaactgcccctgattgggcaggcatgatggggttgacttcatgtgggtctgagtgttgcttttggaaaagatacagataagccttttgatatttattttgtaccttacggagaataattctcccaatggttaagacaggagctagcagcccacccctccagcctttccccccatgcagggctgaaaggcaagcttcacattggaactctgattttgcctttttgtttactgaggtcctggaacatcaggtttcctgggataggtgagaccacttgatgccatgtctgtattctagcaggtcaagcttgaaacggttcttgactcctccatggaacatttcctgaacatttacgggctatgcattgggaactgcaggggcacagtgatgggcaaagattagctgcttccagaaggctgatttcgtgggctccacaatggtaaaacgctgctgtgagtggcagagaggttccccaggtgatggccagttcccaaatcatttggtactaaggctttgacattctggcacatcacatcaaatagaacacagcctccctggaaggacttaagtgagaaagaacaagagaagctgcaactcctggacccttttgtcctcagtgtgtggttcctgcgtccttccccagggcaggagagaggagatgagagctctggtcaaaacctgccagctagtggaacagccttctatagagccttctgcaagaaacgagtgggtttgaagaaccaaaacatttgtggtaggtctcccaggagcttgttaaacctggaaacaccacctgagttggtttcatctgctcattggaagaaagaaaatgaaccaggaaaaagcatctttgtcatgaaatgctatgccatgccacccacccagttgaattggaatcctgttaaaacatgagatttaccagaaacagtcctttgtctagatggaaacaaacaagatcctggcttctctctaatgagttaccaactgagaggtgcttggattggccaggggaggaggaagatggccaccacaacttagccatgtccagccttctcttagatttcactcctgtgatgtttgtgcgactatttgggagtttgtatagtttgtttttttttttttgttttgttttgtttttttttagatgtctaagatgggaaagggcgaaggacattgaagctaaggaatagatatgacctagctaaccaagcttttctcatttctttctgttttgttttgttgagatggagttttgctcttattgcccaggctggagtgcagtggcacaatctcagctcactgcaacctctgcctcccgggttcaagcgattctcctgcctcagcctcccaagtagctgggattacaggcatgcactaccacacccagctaattttgtatttctagtagagatggggtttctccatggtggtcaggctggtctcgaactcctgacctcagataatctgcccgccttggcctcccaaattgctgggattacaggtgtgagccaccgcacctggcctgcttttttcatttctttctaggggcaatgcaagtggcatgtattccttttgttggagggaagaatccttaattgcacctgcatttgtagtatccttcaatgtaaagtgcatatttactgcactctctgagtgctatgggaatgtctgctgttattagttatggggctgctaatactgttttaattgcatatgctatatcaatacttctgttcagattagcctgatctagtattgctaaaactcattttaagcttttgcggtaacttgtatatattcttaaatctaaaggatggcaggaacatgaggggagcttgtggagagtgcttgcttattcaacatttttattgtgataaatgtatgtaaccatctattgatgaaatccaagtctggcattccatgggctccttgccagatggcagaaacttaatgagttatatagcatcctttgtaatgctgcttgttatagttggaatgtacttgtgatatttggctgtatttaactataatggtgaaggtgaccctttagatccaataaggcttctccccatcttttcttctacattttgttatgaacacagtaaggcacagtagtatgttctttttttggaacagggtaggcattttgtttattgtttgcttgcttctaggtgttttcgccatcagggtgtattggaggctgacacttaatgggtgtgtgttacgcccagaactgctcggtgtcggggttctaaaagaatgcgctggtgttcttggcttcaagtttctgctttggagaagcagattcaggaagtaggtgttgcttaaaaataattcttggtttttatctaatcagatattcattgattacctaccaggtgccagttatagggtgttttgtttactcaagaatgaagtagaactatttttaaaacctgtttccatgagtgttcacgttaggtgacctaagctttgaaggagaaaaacatttttgggtatgaataatgagttttgtaatcaattcccagttagaagaatttcagtctctgggccattgagcttggcagtgttgagatctcccatgtgacagaagcctgacatctgggccaccaaggctcactgactgtgtaccttgcagactgtagacccatgtcgtggcggtaacggggccaaacacagtcattcccatgtgaacgatggaggcacatcccactttattattaatccttgtatatactcagtcaggacagattttaacttgtcgctgtcatgactttttttttttttttttgaggcaaggtctcgctctgttgcccattctggagtgcagtggtgtgatctcggctcactgcaacctcttgcctcccaggttcaagcaattttcgtgcctcagcctcccgagtagctgggactactggtacatgccaccaggcctggccaagttttgtagttttaatagagatggggtttcaccatgttggccaggctggtctcaaactcctagcctcaagtgttctgcccacctcagccttccaaagtgctgggattctgggtgtgagccactgtcatgcctggcctcgtcatgactcttttctctttttttttttttttttttttgagatttagttttgctctttttgcccaggccggagtgcaatggcacgatcttggctcactccaacctccgcctcctgggttcaagtgattctcctgcctcagcctcccgagtagctgggattacaggtgcccaccaccacatccagctaatttttttgtatttttagtagagacggggtttcaccatgttggccaggctggtctcgaactcctgaccttgggtaatccacctgccttggcctcccaaggtgctgggattacaggcatgagccaccgtgcccagcctatcatgactcaactgggatctggcacactgcactgggtgttttgttctctgatgtgcacattgatgaatgcatattggtacaagggaaacgaatctgttttcagccatttaaaaaattgtgttgtaaagcaaacaaaaatagcttgaacatttaaaaattactgtttaatattgtttgactgattttctaagaattatgtgaacaatgatgagtccagggcagcagccatcacaaatatgacagtccagcaaggcccatggaggtccctttggaagggacttgcacagctgattttctttttccagtgttgtttttacgggtgaaacgtggcttttgaaatactttagttgtttggcttagagctcccactttccccctaacatagtgcctgtctgttttttaaaacattttacccttcggcactattttctgctattcccattaatattatgtaacataaaccacttgctactgatttgggcatattacagactacaattactagttgctttgaatgcattggcactcttaattattgcaaaggagaattgaaaagtagtcttgtggtcctagttaatttagctttgggcaaactaagtggcttttcttctgtcctcttctcaaaaggccttttaagcagcagagactgggctaaatactggaactgaattccacttttctgcctgctcatttgctgccaaagaccacttggggctccttgtctagaatgctctaagacgaaatttggccagacacagggttccttgattgttctgttcaactaatagagaacctacattttgccttcttaatatcgactttcttttgtaccaggtttttctttctttcttttttgccttaggagcttagctcaaagttcagctaacctttgacactactagtgtcatttagtaacagtaatctttgacactactagtgtcatttaggagcttagctcaaagttcagctaacctttgacactgctagtgcgttcaagaaagggtagggaatgaagtacccttaatgcagggtcagcaaacttttcctgtaaaaggccagataggaagtatttttggctttttgggctgtttgcttttgctactactactgtgggaatgaccatggtcatggctgtgttccagcacaacttgatttaccaagacaagctgtgggctgtatttggtcctcaggctgtggcttgctagcccctgctctaatggattgtgttggcggcaatggcaagattcccttgctgagaacatgcagatgaataaccttatagctgggatgcagagaggagaaagttctgtaggtaataagtgcactgtattccctctgagctacttcctgggcatagttacatgtatggccagtgtgtgtacttgagccatcaggctcagacacttgttgaatatacctctcattgcattagtttgtaattgtgctagtgctgggtgctgagctcagctgcccggatgacctttccagactgaaggacatactcccctaacagctgggagtgctgctggctggccatttacttccagcccttatgaggagtttcccctgctgaagagccctgcctgccccagatcatacccccttcctgcctgtaacccttaccggctccatatggggtacaaagggctggcctcctcaccccaacttgggaaaccctctggggccatcccagctccagagccccttgtggggtcagtgagacctcattgtggccacattacagcccagtgcctctccctgacaagcctgtacccagccggctcagcccacagcactgtcctatgaaccttcctgcacgccattctccacctcagtatctgctttcggggaacccaacctgcgacagtgcttctgtgtgttttcagtcctgcaggtttgaactctgactttggagacttttccagttatctcgtggaatgacagattgtgcctgtatgatatcaggcacaattaatgcaaattaggcagacctatttattctagatgtgaatttgctatttattttaaatgttgattttatgtgttatgtgactctgaacttattgccaaataaaagtttgaattgtatca

SEQ ID NO: 221 - protein, 542 aa, Homo sapiens
MTMAAAAVVRAGARAATAAALRGGCGTARRPCAGPARPLCTAPGTAPDMKRYLWERYREAKRSTEELVPSIMSNLLNPDAIFSNNEMSLSDIEIYGFDYDYTLVFYSKHLHTLIFNAARDLLINEHRYPAEIRKYEYDPNFAIRGLHYDVQRAVLMKIDAFHYIQLGTVYRGLSVVPDEEVIEMYEGSHVPLEQMSDFYGKSSHGNTMKQFMDIFSLPEMTLLSCVNEYFLKNNIDYEPVHLYKDVKDSIRDVHIKGIMYRAIEADIEKYICYAEQTRAVLAKLADHGKKMFLITNSPSSFVDKGMSYIVGKDWRDLFDVVIVQAEKPNFFNDKRRPFRKMNEKGVLLWDKIHKLQKGQIYKQGNLYEFLKLTGWRGSRVLYFGDHIYSDLADLTLKHGWRTGAIIPELRSELKIMNTEQYIQTMTWLQTLTGLLEQMQVHRDAESQLVLQEWKKERKEMREMTKSFFNAQFGSLFRTDQNPTYFLRRLSRFADIYMASLSCLLNYDVSHTFYPRRTPLQHELPAWSPPTFGTPLLQEAQAK

SEQ ID NO: 222 - DNA, 7236 bp, Homo sapiens
gcgggtagatcttgggccgggcagcagcagtcgcagagcggcgcggcggcggtggcggcagcaggcagcaggcatgaccatggcagcggcggcggtggtggcacgcggggccggggcgagggcagcgacagcggcggctttgcggggtggctgcgggaccgcggctcgggggcggccgtgtgcgggccccgcccggcccttgtgcactgcacccgggaccgccccggacatgaagcgctacctgtgggagcgctaccgggaggcgaagagaagcacagaagaattggttccttccattatgagcaacttgttgaatccagatgccattttctcaaacaatgaaatgagcctgtcagacattgaaatctatggcttcgattatgattacaccttggtgttttattcaaagcacctccacacgctgatatttaatgctgcacgggaccttctcatcaatgaacaccggtatccagcagaaatcaggaagtatgagtatgacccaaattttgcaattcgtggacttcattatgatgtacagcgggtagtattaatgaagatcgatgcttttcattatatccagctgggaactgtctacagaggcctcagtgttgtccctgatgaagaagtcattgaaatgtacgaggggtcccacgtgcccttggagcagatgagtgacttttacggaaagagctctcatggaaacacgatgaagcagttcatggacatcttctccctgcccgagatgaccctcctgtcctgcgtgaatgaatacttcctcaagaacaacatcgactatgagcctgtgcatctgtacaaagatgtcaaggattcaattcgagacgtccacatcaaaggaataatgtacagagcaattgaagcagacattgaaaagtacatctgctatgctgagcagacccgcgcagtgttggccaaactggctgatcatggcaagaagatgtttctcatcaccaatagccccagtagctttgtggacaaagggatgagttatatcgttgggaaagactggagggacctgttcgatgtggtcattgttcaggctgagaagccaaacttctttaatgataagcggaggcctttccgaaagatgaatgagaaaggtgtcttactctgggataaaatccataagttgcagaaaggccagatatacaagcagggtaatttatatgaatttttgaagcttactggatggagaggatccagagtgttgtattttggtgaccatatatacagtgacctggcggatttgaccctaaagcatggctggaggactggtgcaatcatcccagagttgagatctgagctcaaaatcatgaacacggagcaatacattcaaaccatgacctggctgcagaccttgactggcttattggaacagatgcaggttcacagagatgctgagtcacagctggttttgcaggagtggaaaaaggaaaggaaggagatgcgagaaatgaccaagagtttcttcaatgcccagtttggaagcctgttccgcacagaccagaacccaacctacttcctaaggcgcctgtcgcgcttcgctgacatctacatggcgtctctgagctgcctcctgaactatgacgtcagccacactttctacccccggaggactccactgcagcacgaactgcccgcctggtcagaaaggccccccaccttcggaacccctctcctgcaggaggcccaggccaagtagccaagggcaaaaactagaaactgtaactgcccctgattgggcaggcatgatggggttgacttcatgtgggtctgagtgttgcttttggaaaagatacagataagccttttgatatttattttgtaccttacggagaataattctcccaatggttaagacaggagctagcagcccacccctccagcctttccccccatgcagggctgaaaggcaagcttcacattggaactctgattttgcctttttgtttactgaggtcctggaacatcaggtttcctgggataggtgagaccacttgatgccatgtctgtattctagcaggtcaagcttgaaacggttcttgactcctccatggaacatttcctgaacatttacgggctatgcattgggaactgcaggggcacagtgatgggcaaagattagctgcttccagaaggctgatttcgtgggctccacaatggtaaaacgctgctgtgagtggcagagaggttccccaggtgatggccagttcccaaatcatttggtactaaggctttgacattctggcacatcacatcaaatagaacacagcctccctggaaggacttaagtgagaaagaacaagagaagctgcaactcctggacccttttgtcctcagtgtgtggttcctgcgtccttccccagggcaggagagaggagatgagagctctggtcaaaacctgccagctagtggaacagccttctatagagccttctgcaagaaacgagtgggtttgaagaaccaaaacatttgtggtaggtctcccaggagcttgttaaacctggaaacaccacctgagttggtttcatctgctcattggaagaaagaaaatgaaccaggaaaaagcatctttgtcatgaaatgctatgccatgccacccacccagttgaattggaatcctgttaaaacatgagatttaccagaaacagtcctttgtctagatggaaacaaacaagatcctggcttctctctaatgagttaccaactgagaggtgcttggattggccaggggaggaggaagatggccaccacaacttagccatgtccagccttctcttagatttcactcctgtgatgtttgtgcgactatttgggagtttgtatagtttgtttttttttttttgttttgttttgtttttttttagatgtctaagatgggaaagggcgaaggacattgaagctaaggaatagatatgacctagctaaccaagcttttctcatttctttctgttttgttttgttgagatggagttttgctcttattgcccaggctggagtgcagtggcacaatctcagctcactgcaacctctgcctcccgggttcaagcgattctcctgcctcagcctcccaagtagctgggattacaggcatgcactaccacacccagctaattttgtatttctagtagagatggggtttctccatggtggtcaggctggtctcgaactcctgacctcagataatctgcccgccttggcctcccaaattgctgggattacaggtgtgagccaccgcacctggcctgcttttttcatttctttctaggggcaatgcaagtggcatgtattccttttgttggagggaagaatccttaattgcacctgcatttgtagtatccttcaatgtaaagtgcatatttactgcactctctgagtgctatgggaatgtctgctgttattagttatggggctgctaatactgttttaattgcatatgctatatcaatacttctgttcagattagcctgatctagtattgctaaaactcattttaagcttttgcggtaacttgtatatattcttaaatctaaaggatggcaggaacatgaggggagcttgtggagagtgcttgcttattcaacatttttattgtgataaatgtatgtaaccatctattgatgaaatccaagtctggcattccatgggctccttgccagatggcagaaacttaatgagttatatagcatcctttgtaatgctgcttgttatagttggaatgtacttgtgatatttggctgtatttaactataatggtgaaggtgaccctttagatccaataaggcttctccccatcttttcttctacattttgttatgaacacagtaaggcacagtagtatgttctttttttggaacagggtaggcattttgtttattgtttgcttgcttctaggtgttttcgccatcagggtgtattggaggctgacacttaatgggtgtgtgttacgcccagaactgctcggtgtcggggttctaaaagaatgcgctggtgttcttggcttcaagtttctgctttggagaagcagattcaggaagtaggtgttgcttaaaaataattcttggtttttatctaatcagatattcattgattacctaccaggtgccagttatagggtgttttgtttactcaagaatgaagtagaactatttttaaaacctgtttccatgagtgttcacgttaggtgacctaagctttgaaggagaaaaacatttttgggtatgaataatgagttttgtaatcaattcccagttagaagaatttcagtctctgggccattgagcttggcagtgttgagatctcccatgtgacagaagcctgacatctgggccaccaaggctcactgactgtgtaccttgcagactgtagacccatgtcgtggcggtaacggggccaaacacagtcattcccatgtgaacgatggaggcacatcccactttattattaatccttgtatatactcagtcaggacagattttaacttgtcgctgtcatgactttttttttttttttttgaggcaaggtctcgctctgttgcccattctggagtgcagtggtgtgatctcggctcactgcaacctcttgcctcccaggttcaagcaattttcgtgcctcagcctcccgagtagctgggactactggtacatgccaccaggcctggccaagttttgtagttttaatagagatggggtttcaccatgttggccaggctggtctcaaactcctagcctcaagtgttctgcccacctcagccttccaaagtgctgggattctgggtgtgagccactgtcatgcctggcctcgtcatgactcttttctctttttttttttttttttttttgagatttagttttgctctttttgcccaggccggagtgcaatggcacgatcttggctcactccaacctccgcctcctgggttcaagtgattctcctgcctcagcctcccgagtagctgggattacaggtgcccaccaccacatccagctaatttttttgtatttttagtagagacggggtttcaccatgttggccaggctggtctcgaactcctgaccttgggtaatccacctgccttggcctcccaaggtgctgggattacaggcatgagccaccgtgcccagcctatcatgactcaactgggatctggcacactgcactgggtgttttgttctctgatgtgcacattgatgaatgcatattggtacaagggaaacgaatctgttttcagccatttaaaaaattgtgttgtaaagcaaacaaaaatagcttgaacatttaaaaattactgtttaatattgtttgactgattttctaagaattatgtgaacaatgatgagtccagggcagcagccatcacaaatatgacagtccagcaaggcccatggaggtccctttggaagggacttgcacagctgattttctttttccagtgttgtttttacgggtgaaacgtggcttttgaaatactttagttgtttggcttagagctcccactttccccctaacatagtgcctgtctgttttttaaaacattttacccttcggcactattttctgctattcccattaatattatgtaacataaaccacttgctactgatttgggcatattacagactacaattactagttgctttgaatgcattggcactcttaattattgcaaaggagaattgaaaagtagtcttgtggtcctagttaatttagctttgggcaaactaagtggcttttcttctgtcctcttctcaaaaggccttttaagcagcagagactgggctaaatactggaactgaattccacttttctgcctgctcatttgctgccaaagaccacttggggctccttgtctagaatgctctaagacgaaatttggccagacacagggttccttgattgttctgttcaactaatagagaacctacattttgccttcttaatatcgactttcttttgtaccaggtttttctttctttcttttttgccttaggagcttagctcaaagttcagctaacctttgacactactagtgtcatttagtaacagtaatctttgacactactagtgtcatttaggagcttagctcaaagttcagctaacctttgacactgctagtgcgttcaagaaagggtagggaatgaagtacccttaatgcagggtcagcaaacttttcctgtaaaaggccagataggaagtatttttggctttttgggctgtttgcttttgctactactactgtgggaatgaccatggtcatggctgtgttccagcacaacttgatttaccaagacaagctgtgggctgtatttggtcctcaggctgtggcttgctagcccctgctctaatggattgtgttggcggcaatggcaagattcccttgctgagaacatgcagatgaataaccttatagctgggatgcagagaggagaaagttctgtaggtaataagtgcactgtattccctctgagctacttcctgggcatagttacatgtatggccagtgtgtgtacttgagccatcaggctcagacacttgttgaatatacctctcattgcattagtttgtaattgtgctagtgctgggtgctgagctcagctgcccggatgacctttccagactgaaggacatactcccctaacagctgggagtgctgctggctggccatttacttccagcccttatgaggagtttcccctgctgaagagccctgcctgccccagatcatacccccttcctgcctgtaacccttaccggctccatatggggtacaaagggctggcctcctcaccccaacttgggaaaccctctggggccatcccagctccagagccccttgtggggtcagtgagacctcattgtggccacattacagcccagtgcctctccctgacaagcctgtacccagccggctcagcccacagcactgtcctatgaaccttcctgcacgccattctccacctcagtatctgctttcggggaacccaacctgcgacagtgcttctgtgtgttttcagtcctgcaggtttgaactctgactttggagacttttccagttatctcgtggaatgacagattgtgcctgtatgatatcaggcacaattaatgcaaattaggcagacctatttattctagatgtgaatttgctatttattttaaatgttgattttatgtgttatgtgactctgaacttattgccaaataaaagtttgaattgtatca

SEQ ID NO: 223 - protein, 542 aa, Homo sapiens
MTMAAAAVVRAGARAATAAALRGGCGTARRPCAGPARPLCTAPGTAPDMKRYLWERYREAKRSTEELVPSIMSNLLNPDAIFSNNEMSLSDIEIYGFDYDYTLVFYSKHLHTLIFNAARDLLINEHRYPAEIRKYEYDPNFAIRGLHYDVQRVVLMKIDAFHYIQLGTVYRGLSVVPDEEVIEMYEGSHVPLEQMSDFYGKSSHGNTMKQFMDIFSLPEMTLLSCVNEYFLKNNIDYEPVHLYKDVKDSIRDVHIKGIMYRAIEADIEKYICYAEQTRAVLAKLADHGKKMFLITNSPSSFVDKGMSYIVGKDWRDLFDVVIVQAEKPNFFNDKRRPFRKMNEKGVLLWDKIHKLQKGQIYKQGNLYEFLKLTGWRGSRVLYFGDHIYSDLADLTLKHGWRTGAIIPELRSELKIMNTEQYIQTMTWLQTLTGLLEQMQVHRDAESQLVLQEWKKERKEMREMTKSFFNAQFGSLFRTDQNPTYFLRRLSRFADIYMASLSCLLNYDVSHTFYPRRTPLQHELPAWSPPTFGTPLLQEAQAK

SEQ ID NO: 224 - DNA, 7035 bp, Homo sapiens
gcgggtagatcttgggccgggcagcagcagtcgcagagcggcgcggcggcggtggcggcagcaggcagcaggcatgaccatggcagcggcggcggtggtggcacgcggggccggggcgagggcagcgacagcggcggctttgcggggtggctgcgggaccgcggctcgggggcggccgtgtgcgggccccgcccggcccttgtgcactgcacccgggaccgccccggacatgaagcgctacctgtgggagcgctaccgggaggcgaagagaagcacagaagaattggttccttccattatgagcaacttgttgaatccagatgccattttctcaaacaatgaaatgagcctgtcagacattgaaatctatggcttcgattatgattacaccttggtgttttattcaaagcacctccacacgctgatatttaatgctgcacgggaccttctcatcaatgaacaccggtatccagcagaaatcaggaagtatgagtatgacccaaattttgcaattcgtggacttcattatgatgtacagcgggcagtattaatgaagatcgatgcttttcattatatccagctgggaactgtctacagaggcctcagtgttgtccctgatgaagaagtcattgaaatgtacgaggggtcccacgtgcccttggagcagatgagtgacttttacggaaagagctctcatggaaacacgatgaagcagttcatggacatcttctccctgcccgagatgaccctcctgtcctgcgtgaatgaatacttcctcaagaacaacatcgactatgagcctgtgcatctgtacaaagatgtcaaggattcaattcgagacgtccacatcaaaggaataatgtacagagcaattgaagcagacattggtatgcctttccgaaagatgaatgagaaaggtgtcttactctgggataaaatccataagttgcagaaaggccagatatacaagcagggtaatttatatgaatttttgaagcttactggatggagaggatccagagtgttgtattttggtgaccatatatacagtgacctggcggatttgaccctaaagcatggctggaggactggtgcaatcatcccagagttgagatctgagctcaaaatcatgaacacggagcaatacattcaaaccatgacctggctgcagaccttgactggcttattggaacagatgcaggttcacagagatgctgagtcacagctggttttgcaggagtggaaaaaggaaaggaaggagatgcgagaaatgaccaagagtttcttcaatgcccagtttggaagcctgttccgcacagaccagaacccaacctacttcctaaggcgcctgtcgcgcttcgctgacatctacatggcgtctctgagctgcctcctgaactatgacgtcagccacactttctacccccggaggactccactgcagcacgaactgcccgcctggtcagaaaggccccccaccttcggaacccctctcctgcaggaggcccaggccaagtagccaagggcaaaaactagaaactgtaactgcccctgattgggcaggcatgatggggttgacttcatgtgggtctgagtgttgcttttggaaaagatacagataagccttttgatatttattttgtaccttacggagaataattctcccaatggttaagacaggagctagcagcccacccctccagcctttccccccatgcagggctgaaaggcaagcttcacattggaactctgattttgcctttttgtttactgaggtcctggaacatcaggtttcctgggataggtgagaccacttgatgccatgtctgtattctagcaggtcaagcttgaaacggttcttgactcctccatggaacatttcctgaacatttacgggctatgcattgggaactgcaggggcacagtgatgggcaaagattagctgcttccagaaggctgatttcgtgggctccacaatggtaaaacgctgctgtgagtggcagagaggttccccaggtgatggccagttcccaaatcatttggtactaaggctttgacattctggcacatcacatcaaatagaacacagcctccctggaaggacttaagtgagaaagaacaagagaagctgcaactcctggacccttttgtcctcagtgtgtggttcctgcgtccttccccagggcaggagagaggagatgagagctctggtcaaaacctgccagctagtggaacagccttctatagagccttctgcaagaaacgagtgggtttgaagaaccaaaacatttgtggtaggtctcccaggagcttgttaaacctggaaacaccacctgagttggtttcatctgctcattggaagaaagaaaatgaaccaggaaaaagcatctttgtcatgaaatgctatgccatgccacccacccagttgaattggaatcctgttaaaacatgagatttaccagaaacagtcctttgtctagatggaaacaaacaagatcctggcttctctctaatgagttaccaactgagaggtgcttggattggccaggggaggaggaagatggccaccacaacttagccatgtccagccttctcttagatttcactcctgtgatgtttgtgcgactatttgggagtttgtatagtttgtttttttttttttgttttgttttgtttttttttagatgtctaagatgggaaagggcgaaggacattgaagctaaggaatagatatgacctagctaaccaagcttttctcatttctttctgttttgttttgttgagatggagttttgctcttattgcccaggctggagtgcagtggcacaatctcagctcactgcaacctctgcctcccgggttcaagcgattctcctgcctcagcctcccaagtagctgggattacaggcatgcactaccacacccagctaattttgtatttctagtagagatggggtttctccatggtggtcaggctggtctcgaactcctgacctcagataatctgcccgccttggcctcccaaattgctgggattacaggtgtgagccaccgcacctggcctgcttttttcatttctttctaggggcaatgcaagtggcatgtattccttttgttggagggaagaatccttaattgcacctgcatttgtagtatccttcaatgtaaagtgcatatttactgcactctctgagtgctatgggaatgtctgctgttattagttatggggctgctaatactgttttaattgcatatgctatatcaatacttctgttcagattagcctgatctagtattgctaaaactcattttaagcttttgcggtaacttgtatatattcttaaatctaaaggatggcaggaacatgaggggagcttgtggagagtgcttgcttattcaacatttttattgtgataaatgtatgtaaccatctattgatgaaatccaagtctggcattccatgggctccttgccagatggcagaaacttaatgagttatatagcatcctttgtaatgctgcttgttatagttggaatgtacttgtgatatttggctgtatttaactataatggtgaaggtgaccctttagatccaataaggcttctccccatcttttcttctacattttgttatgaacacagtaaggcacagtagtatgttctttttttggaacagggtaggcattttgtttattgtttgcttgcttctaggtgttttcgccatcagggtgtattggaggctgacacttaatgggtgtgtgttacgcccagaactgctcggtgtcggggttctaaaagaatgcgctggtgttcttggcttcaagtttctgctttggagaagcagattcaggaagtaggtgttgcttaaaaataattcttggtttttatctaatcagatattcattgattacctaccaggtgccagttatagggtgttttgtttactcaagaatgaagtagaactatttttaaaacctgtttccatgagtgttcacgttaggtgacctaagctttgaaggagaaaaacatttttgggtatgaataatgagttttgtaatcaattcccagttagaagaatttcagtctctgggccattgagcttggcagtgttgagatctcccatgtgacagaagcctgacatctgggccaccaaggctcactgactgtgtaccttgcagactgtagacccatgtcgtggcggtaacggggccaaacacagtcattcccatgtgaacgatggaggcacatcccactttattattaatccttgtatatactcagtcaggacagattttaacttgtcgctgtcatgactttttttttttttttttgaggcaaggtctcgctctgttgcccattctggagtgcagtggtgtgatctcggctcactgcaacctcttgcctcccaggttcaagcaattttcgtgcctcagcctcccgagtagctgggactactggtacatgccaccaggcctggccaagttttgtagttttaatagagatggggtttcaccatgttggccaggctggtctcaaactcctagcctcaagtgttctgcccacctcagccttccaaagtgctgggattctgggtgtgagccactgtcatgcctggcctcgtcatgactcttttctctttttttttttttttttttttgagatttagttttgctctttttgcccaggccggagtgcaatggcacgatcttggctcactccaacctccgcctcctgggttcaagtgattctcctgcctcagcctcccgagtagctgggattacaggtgcccaccaccacatccagctaatttttttgtatttttagtagagacggggtttcaccatgttggccaggctggtctcgaactcctgaccttgggtaatccacctgccttggcctcccaaggtgctgggattacaggcatgagccaccgtgcccagcctatcatgactcaactgggatctggcacactgcactgggtgttttgttctctgatgtgcacattgatgaatgcatattggtacaagggaaacgaatctgttttcagccatttaaaaaattgtgttgtaaagcaaacaaaaatagcttgaacatttaaaaattactgtttaatattgtttgactgattttctaagaattatgtgaacaatgatgagtccagggcagcagccatcacaaatatgacagtccagcaaggcccatggaggtccctttggaagggacttgcacagctgattttctttttccagtgttgtttttacgggtgaaacgtggcttttgaaatactttagttgtttggcttagagctcccactttccccctaacatagtgcctgtctgttttttaaaacattttacccttcggcactattttctgctattcccattaatattatgtaacataaaccacttgctactgatttgggcatattacagactacaattactagttgctttgaatgcattggcactcttaattattgcaaaggagaattgaaaagtagtcttgtggtcctagttaatttagctttgggcaaactaagtggcttttcttctgtcctcttctcaaaaggccttttaagcagcagagactgggctaaatactggaactgaattccacttttctgcctgctcatttgctgccaaagaccacttggggctccttgtctagaatgctctaagacgaaatttggccagacacagggttccttgattgttctgttcaactaatagagaacctacattttgccttcttaatatcgactttcttttgtaccaggtttttctttctttcttttttgccttaggagcttagctcaaagttcagctaacctttgacactactagtgtcatttagtaacagtaatctttgacactactagtgtcatttaggagcttagctcaaagttcagctaacctttgacactgctagtgcgttcaagaaagggtagggaatgaagtacccttaatgcagggtcagcaaacttttcctgtaaaaggccagataggaagtatttttggctttttgggctgtttgcttttgctactactactgtgggaatgaccatggtcatggctgtgttccagcacaacttgatttaccaagacaagctgtgggctgtatttggtcctcaggctgtggcttgctagcccctgctctaatggattgtgttggcggcaatggcaagattcccttgctgagaacatgcagatgaataaccttatagctgggatgcagagaggagaaagttctgtaggtaataagtgcactgtattccctctgagctacttcctgggcatagttacatgtatggccagtgtgtgtacttgagccatcaggctcagacacttgttgaatatacctctcattgcattagtttgtaattgtgctagtgctgggtgctgagctcagctgcccggatgacctttccagactgaaggacatactcccctaacagctgggagtgctgctggctggccatttacttccagcccttatgaggagtttcccctgctgaagagccctgcctgccccagatcatacccccttcctgcctgtaacccttaccggctccatatggggtacaaagggctggcctcctcaccccaacttgggaaaccctctggggccatcccagctccagagccccttgtggggtcagtgagacctcattgtggccacattacagcccagtgcctctccctgacaagcctgtacccagccggctcagcccacagcactgtcctatgaaccttcctgcacgccattctccacctcagtatctgctttcggggaacccaacctgcgacagtgcttctgtgtgttttcagtcctgcaggtttgaactctgactttggagacttttccagttatctcgtggaatgacagattgtgcctgtatgatatcaggcacaattaatgcaaattaggcagacctatttattctagatgtgaatttgctatttattttaaatgttgattttatgtgttatgtgactctgaacttattgccaaataaaagtttgaattgtatca

SEQ ID NO: 225 - protein, 127 aa, Homo sapiens
MEAHPTLLLILVYTQSGQILTCRCHDFFFFFLRQGLALLPICSGVISAHCNLLPPRFKQFSCLSLPSSWDYWYMPPGLAKFCSFNRDGVSPCWPGWSQTPSLKCSAHLSLPKCWDSGCEPLSCLASS

SEQ ID NO: 226 - DNA, 40445 bp, Mus musculus
  misc_feature (1)...(40445): n = A,T,C or G
cttattttgggtttgtgccacagtaagagcaagattttaagctctactaaaaacaaaacaaacaaacaaaaagactttatgttcatttaaaacaactaacagtaatatattattttaaaatatcatgcagctaacatgtttggagtgattcaaaattcatattgagaaaaatgcatgtatttcagtattactgtagacaagcatctacataagactgttcaattattttttgctttatatcaaacaacctttataatgctcatttttattgttacaataatttataaattttaaagaatatgatagaataaaaaaagagtcaatgcccaaataaataaataaataagcctgaataaaactatttccatgaaagcccttatttgaggaaccatcagttctttgggccaaagaaacaaactaaaggtcagatgtgtttcctttaggaatccacatattacatatatgtccatatattacatattttggtcatttaggccacgtcaatttttgtctgatactcctagtttattataatcttaaaataacattaaaactatgtatatttcatgatattcatgaattgtggaaaaaccagccttcatgtaggtcagagtttatcaatactggtactaaaaataccagaactttgggatgaagagtatgaatcacagctatatcgttttctcttggtgtttcagacatatcgtgttctcttggtgtttcagacacatatagaactttggagttagaattagaacacaaggtgaatgcaagaagtcatgagagactggcttcgcttagctctgatactctggtgttaataatgtggtatgcagatttcaacacagaagctacagttagacagagttttttcttgagtcagctaattatcttgttgggacccatgtcaccaataaaagtaagggaaaggagggcatccgtatatataatactgtcactaggaataatatattaagatatcaaaactcccagggtaattacttgacaatttgtatgtgaagatgcatgcacgtgtgcaggtgctcatgcatacagtatgagttccagaagtctcctcatctctgtttcactggtgctgggatgccctcaactgatttacaagtattatttaagaactcttggtaattgtgatcacagaaatgaatttaaattcatctatagtgcatcatttatactctcctatttatgtcacagttgtgtgcagtgtatgagagtcccagtcttgtgcaaccatctgaaacaatggttttcaacaagtctgacatggaatagattgagctaaaactcactagatgccaccagaagagtgatatggcatctacactgtgatggccagctggaaataaacctaatattacataacaacccaacctcctaagatccgtttttctggagaattttcttaataaggacattctatataattggtagatatttccattcagaagcacacattgctacacagaacactgtaactattcaaaatagccaaggcaacaatgcacacaaaggatcataactctctaataaaagattctgaagagggctgaagagatggctcggcagttgagaggtctgtctgctcttccagaggttctgagttcaattcccagcaaccatatagtggcttacaatcatctctaatgagatctgattcttggttttaaggctatgcgaagactcatatacatgaaaataaatgtataaataaatattttaaaagattccaaagaaattggagtagattaaattcctgtcaaatacttcataaataatgaaaaaaatcaatcacatgagaagcaagaaatgttgaaggaggaaatgtatctaatgaggaacagaatgtgtatgagaagaagaagggactttaagggaagtagctagataagggcggggaatggcagagggcagcaggcaaatgaatgaataagaacagataagactgaatgacaatgtataatggcatacatgtatggaaatgccttagtaaaactctccatgttgtatgtgcacttaaaatgtaatgaaatagaaaaaaacctcaatgagaaccaggaaaatactgatgaatgaaattaaaataaatacataagatttgtcttagatattcagaaatgtaaaattttgaaagaattcttgaaagttcatttacaataagcacaatatacacaccagagaagaaggcagagtaagaaggtaggaagaaaggaaggtagagagcaagcaaggaaagaagcagtcaagtttcattaagaaaccaaggaagtgagatgctccaaaacagacatgaaagaaatctcaaagaaggcaacaaaagatgctaagattaccgtttacagtttataaacctcaatgttatcaaagtgtccatacttcagatagtgatctacagactcaatgcaatttcaatcaaaacatcaatgccatttagaactagactgtggaatcacaaaactcacgtgggaacacagaagactgcaaatagccaaaacaatattgatcaaaaccagcggggctaggagtcactgcaatacctgatttcaagcatagcacagagccacagtgacaaaaacagtccaataactgcatgaagacaggctcatagaccaacaaactgagaggcagagcagagccaccaatgtgcatgactgtgcaggcaacagattgcatctacagtcagtcaatatgtcaccaaggcttctgaatgctcacactgtacaaagggcagatggtttgaagaatggaatttggcaaactggacatcaggcaaggttaaaccttgacactcactcttcacactatacaaaaaccaaccctatgtgtcccaaagagcttgctgtaagatggaaaccttgaagctcttaaagggaaacaggtatgaaaaacttcatcagattggcccacctgaggttctcaaagcataggatcaaaagggaactgacaagtagcttgccatctaacggaaacacttcttaaatacaaagcaaataaacaccagagaaatgagatgatttacaatgaaaagccttaggagtgcatcatgtaacagtctcaccagagagaccccaggatgtcaacaggagcagaacatggacatgacaaagtttgtcagagtcactttgaaacatctcaaagaagtgaaatagaaaggtgcttcctggaccaactggaaacacttcccccacggactcctcccgatatggagaggccttagagttgaatgagctcacctgctctgtgaaaagctcttctttactgaggataattttaacatcgcttgcaaccgtgtcaatgaaataattttgcaagtggaaaacctttgaaaagtagggatttccaatgtacttcaatagtttctctgttaaggatgtatctggctcatctgagagcaaatgtggagacttaatgtttgccttgagctcctccagtgtcacgttcaaatcctcagcgatgtttttcagtgatgcctcatccaggccaaaggaggatctatagtcattcaaagtctgttgcaacatctccatgtccttttgggtcagtcccagggatggtatggtagcccatgctcttggagttgtggattccttccagaccttttgtttcagcatatccctcttccagtctactatggcatttataacaacttgcaaagttctcatgaatatttggtgtttgtaggctgggagctggctgagaagggtggattccagctttgggaagtcaaagtcagacacatcaaagttagagactaagaagactggaggctcctggtggaaacattctttgagattacttgaaatgcaaatttgaagactcttcaatgtgttctctctattgaatctcatagggttatacagtttttcattctttagatcaatatctgtctttgttcgattaaagtacaaacctctattcatttgcacaatagctttggcaagttctacatcactatgtttaatgcgtccagcagagacaataatgaagtcatactcctcaaacttgattttcttcagataatcatgtggttggaagtgatgaaacccaatggcaggcagttcccatagtattgcactgggaaactttgcgtatgggtatgattttttctcaatggttgtatataccaccccaacaggagcagtcacaccgtcttcatcagctcctgttccctggagagcattgatgagactggactttccagccccagtctcccccatcactgcaatgttcagtgggactttctctatgtcacccagagcactgctgattgcagaaactgtttcctaaaggtttccatcttctaggtacaattcaatgaaggtgattaattcctgagacaggattttggttttcatctggaaggtcaaaagcaggatcctcctttggaggggatgtagaagaggaagtttgacccaatcttggcaaatgtcaatggtacctaagggaggaacaaaccaaaaaggtcaacaaattagttcagcaagaacaaccaatgggagcgcagggtccagtacctgcccctacattataaatagagactttcttctctttaatcaaatgtgcaggacaggacagcacttactcctggctgtaggttcaaattttggtttgactcacattccttaacctttgactattttcttctttacaatgtttttacttcttccagatgaaaatcaaccctgtaatagcagcactagggaggtggtggcgctatggatcacaagtatgaagtcagcctgggttaagatgtccagatttttgtctggaaaagaagttacccaagttcatagttctgtcagcctttccagataaggtcacattatgacatgcacactaacattcaggttttcagttttacttcaataatagacatgaatggtagcaaattcaatgggagagctcagctcatggtcagaaggcatcctaaggctgtggagactcttgatctactgggtttcttgtgactttgatatctacaaaagttctttcactctttggtgctgaaaaccctttgttgtggcaattaaaaccttctggttgtggaggtcataggctctggtggggaagctgctactgttattttgtcaaatgggcatggtatggccatcaatttgtcatttacattttcatgtttgtatccacgaattagcatggctcttaactttggtcatagaagctagtgagtaagagtaactttagattaattcatgatggtcaaagaattgtgcataagtgacttttgaatgctcagtcctaaatgtcctcaattaccccctctaaggcttagtgtgatgtggaagacacaacaaatgatgtcagatctgggggaggggtggagtattttgaaaatgtaataatccctgaaacagtgaaaaactaaatcattcagtcaattagtggaccaatgagagagagagagacagccaagagactatatgaaatggctgatacatattgaaaatttactcgatttcctgaactatcagaggaagggcaattcaatcagaatgttacctccaagaaaccactaccaacagcaaatgttgaaaagaggaagcacactcactgttaaaagttggtgcagttccttcagatattgatcactgtcccaggtacactactcacttcaacgtgaaggactgttagtcaacagaccacacagatgcaagcacatccgtggttatagatgctgtgttaatgatcacaatgaaatcaactcagtgtagatgaatggacaaagacattatggaacataaacaaaataaggatctatgcaattgtgaagaaaaatgaaaccatgagcttttcagaaaaaatttagtataattggaagttgttgttcagagaaaagaatacggacctcagagccacaaataacacatgttgactttcacaggatgaaactaatcttacaaaactctgtgtgtgtgtgtgtgtgtgtgtgtgcctgaagaacatggcctacagaggcagaggcatgcagatgagttcaagatcaggatagtctacaaagtgagttcaagaacatccagtgctgctatacagagaacattgtcttggaaaatcaaaacaaaacacacactggccaaaatgttttcatgtcattttccatagtggtgcaggtgctggaagactatgtagtgggaaaactaagttgttatggcctggatatctactgcctctagccattcatgttacactattacaagtaaactttctcataagttgttgtgactgttactacgaatgttttgttacgtgagctaactcttaacccaaagtctgttatgttctatgcattattgttcttggaaaccaatcataacagaggtcaatgagacctgctttatatagttagccacaaatgcttgtgcagaggtaactgacaccctggttggcaagttgggacatgaaagctaggcaagtcaagtcaccctgcctcagttggtcacccaaccaattaggacaggagaagcatgccacaaatatatgttgtttaggaagcctcttatctctaaatacagattagtggaataacttggcacagagatttgttgatttcagagttcaaagctctctatgaatctggctcagtgttaatcagctcccaagtctggtctgtggcactgattggtcagtcctggagcaaatgctccataaactattcgtggctgactgagactggtgtatggtgtggtttgtaggccagttcctggaccccaacataagaaagtgttgaaattgtcttttaacaaaccccaagtgatgtctcatcttggtgctcaaattgtctccatctggaatttactgaaacccaagtagctgggcacccctctaatgcatttttctaaatggcatcatttgaggttggaagatctactctaattctgggctacatcttgggtggcaacccacataaaaggacaaggaggaaggagacatttcttctttgcttgcttgctctcatttaagctggcaagtttatctattctgctgcggcggcattcattcactggaattagagcccacttcttagggcttccagtgtacactgaaagccggctgtgacaggcagcctcatggactgagttcttggctttcccttcaggagacatctactgttggactggccagatcacaggtgcttagccactctattagatctcctttaatgcatgtagattctatctagcagttctgctcctgtggagaatcttgacctaaactatgtagtaatgagaaatgagaatactctacctatatcatcctagttaagggaaaggtaagatgaaaaaccagcatttttttatcttaatagtggcattatagagacttcttgagaacatcatctgcagatgacaggtttgctctctgctcctcttgataccagtaactcagagctgtgtctatgtcctggacatcccaaatggtaacatatgactcatatatagggcaggcccaagacccattactgcttgtttatatatgatggtacatttataggaaaatagaaaaatattagatgttcagccagacatggtttctaagttcatgttggccacaggagatttaggtacatttttaaaaacaaggcatgcaagaggctcccagtgggaggacctaagctcaggccagggaaaattctcctaagagcccatgatctgacacaaacatcaaacatgttcttcatgacaagttcctaaagaaattgggaaaggagagaacacatctcaacatattaaaagctgcatatggcaaacatatggcccacgttgtgccaaatgagtaaacctcctttattatccattctttattcagttcagtacttgaagtcttagctaggacaataaaaaaacaagtggaaaaaaactataaatagaaaaggcaagagtcaaagataatataaggttctattcataatagaaccccaagtcttcctcagagaactcttacaatcatttcatgaaagtgacagaactcaaaattaacttaaaaatcttggtcgcgtcatgtatcccaatgataaacatgctaaagaagaaaacagaatcaatctcatttatacaattagccaccacctttccccaaataacattcctcgaaataagagtaaccaggaaaggaaaagccctgaataactgaacctttaagagcttcaaaaacattggagtacactaaaaaagaaatactactcatcccataggattagaagaattaatgtcataaaaatggctggcatatgaaaattaatctacagattcaatgcaattcctatcaatattctaatgccatcattcacaggaatagaaaaaaaagtcttaatattaggttgaaagcatgcaagatcccagacaacgcaagcctgaggcagggaaaatactgatgacatcactgtcctggtttcaagctctgcctcagaaacacagtaagaaaagcacatggtatggcctggataccagacaggataaaaagcaagagagctcagacaaaacaaatataaatccacagggctgcagcacttgattttctttgttcatttctttgtttctctctttcctcctccacgtcctctttttttttctttcaaaggatcttattggtgaaatgacctttatgaaatagtgctcaaaacaatgaaaaggaggcacacattgtgatcagaattaatgtcataaaaatggctggcatatgaaaattaatctaaagattcaatgcaattcctatcaatattctaatgccatcattcacaggaatagaaaaaaaggtcttaatattaggttgaaagcatgcaagatctcaaccaaaaccaaagccaaaataaaaaataacaataaaaactacaacaacaaccctccaccccaaagaggaccctgcattgactctgaggaatatggccccacaatacaccctctttctccaagttcaagatggcatcagaagatcaacagacccaggatgtgtgggtgttatggaactttgctcctgtctgggttgggggtgctctgtggtgcagaagacagagaagagcctttctgtgaacaacccctgagtgaaataatccataatggaggaccctctgccctggtaccaggaggcctcctttgattccagtgtcagggctccctcctactgaccattttgcttccctacctcaagatcctcttgtcaaatgatgtcatctactgctgagcagtactgcctttcagatccagtaagcccatgtctcaatgattgcagacacttgctgtaaccctgccttattctgttgatattctttccctcatctctctgtcttactctgtctctgtctctgcctctgtctctgtctctgtctctgtctctgtgtccgtctctgtgtctgtctctgtctctgtctctctctttgtgtgtgtgtgtgtgtgtgtgtgtgtgtgtgtgtgtgtgtgtgtggacatgtgtgtgtagatgctgttgtttctcagatatccttattttgagaaagacacactcactggcctatatttcaccaattaggcaagggtgtctgacaagggagcttcagggatccacctccctccttcttcagtgctggaattacaagctcactccactatgcctgtcttttatgtggattctgggtatccaactcataactttctctttgaaagacagttactttatcctgtgattatctccctagccactcatagaaaaatccatggaaatggtgaacattgtgattaatgtgttaagtgtgctacattttgtaaaaagaaactcatttttatcttgcataagccatgaggaagttgctcctactttgaaagcactcagttagctggccggatgcaatgtttcctggtatggttgggctatttttaaaaatttgataattgctcaaaaatgtttcacggatgttaggcattataaactgcattgctgccctgaacctctgagagcactgtggctcatcttccctgacccttgcactgcattttgatgagaagcgtttcctccatcttcactgtgagtaccggtctctgatcccacgcagaagtccactctctatccaaatgactccaaggtggtattaaattgaaagccaccctcactaaccccactcctgaccacaccaggcagagacttcctaaccacagaggcacagactgtagggacaaggggctaatccattgtttttccttgctccagtattttcctatgtgattctatgggtctgtggttgttcagacagtcactagtctggctggagttttggtttcagtaaattagaggtgttttactaagaaggagcctgaccaagacaaaaccagagaaaattctctaagtaaggtcccaaatattgttagctaaagaattatagagtgaataaccacagttattatttggggatcaaattaatttatatcctgcccgagcactggcaagtcttgattctgtaacagacctccagcaggacccccagcaattccaacaagcagttcacacaacagcagggcttagacattagcctgtttcatctgtgacccattaccttgtaggcctatctaggggcagtgaaacagttttgaacaattagtaatgttttaaggatagcccaactgtgcagagctgggagtattccctatccagagctggacctgggttgtctcctggctggtgctcacagtttctcatgggcaggggctgacagtgactgtccttaacaatgtagtgaaatgagtaagagccactcaatatattacatgtaatatatattagatacaatatgtatgtattctatgttatagccaaccaagcctaaatatatatctttacacacacacacacacacacacacacacacacacacacacacacacacattgcacacacatacacacaaagacacatcgcattgttcacagtctctgtgacacttctcatgctttgttgttccgatgtggcttggtctataggaacagtctgcaatcctttatttttacaatgaatgtttgataaataatcattatgttttgacatcagaattgaaaccaagtgttgtggtcactatcagaattgataaaaatttgacaaaacctttgaatggtacaactttgttccttggtatgctgtctgtggatgttatacagcaatggggaccaaggatacacactgggcctatactcctaattctataattaacatagaagtaaattggggggggggatacagatcttcccttggtggttagtcaatctttttgtttccctgatccttatgacaactggagaagtgctaagcctatggagcagggtacagaaatcatgaattatactgtgggagtgcaaggaactcctattttatgggtaaatagaactcaaagtctacatagaacttttcaagttatggttgtccatagttgatgctacctagaattttcataataaattttacatgcctttagaggatgatagaagattattgctactagttccataaatctgacatttcgccttgtgatatgtggattactgacaaggcattagactggatacagaggcagaaatgttaaagggagcacccttggatgcttgttgacatctcctctgaagaaaccattgattggagctcttatggctttcttcaggaaaatggtcttactcagaatttagactgcaacagtagagttcaattggaactgtggaaattagttctactgttaatgaatgtatttgatggcatggagttggactgtcagtgctctcctgcaatctgaccatccagtgcagacttatttctggaaattaacaagtgccttttaccctcctaaagcatggaaaaggagtttaaacattaatgatggtttgtcgtctttgacctttagcttaaatctatgtcacccctttgtagtatggatatcattccctaatttgctactgaaaaggcctgtccagtgccagcctaatgattatagtatcccttgtgactatcggactcttcatagctgtgctaattctagtatgtccttaaatgtcacttcagaaagtttgtgctttcttagagcaaagccagctgtccagaaggcggtaagattgtcaagaccatggcaaaattcacctgtgatgatttttaatacttgatgagagtattaagaagaacttgtaggatgactggggtgtttgttgctgtagctatggggattattgctttagctactgttgatacactgcaggtagatcagcggttcataaagtaatttgaactgccgagttcatgagggactggcataaacattctgcagaactttggactcaacacaataaaatagtgacatggttaatgaaatagctgatctgagacaagctctaatactaactggagttagagacaaagaacaagtgaagtttaaatgtgatggcatgttatatattgtattttatctttaaatttcaatgagaacaagtatgactggaaaaaaggttaaaatgcatttgatgggccaccctcattcttattaaatgatttataattttcaacaagaaattaagaatatgttctcaaaaagcttgcctgaaatgactggggtgaatgttatggaaagcagtgcagatattttagctttcttcaatcttgtgcatcatttaaatagattccttggtctagcaactgctatccttgtctttttacttatagctttactggctcctttgtgcaagattgtgaaacagcatgatagagaaaacactgtatttactggaaggatgcatgatcttcaacataaatttaattcccaagataactgaatagagtttaaacaaaagagagatgcagtgggcaaactggaagagccattgcacctggcatttactttggagtgatggccacttacagtgtgaagttaagctcttgaaaacaatcagtgacagttatctgagattttgggggttgctgattcttgggaatttcagatccttagcatgtcctcagtaccaagactcacctggcaaaccaggaagccttgtgtgcccgagaattgctcaggtaatgattctttcagacaactcctagattaagcaagaggttttggtctgtgggaactgaattcctaaatggcttttgtgtgtgtgtgtgtcaatcaaagaaactgcttctgtaagcctctgtgggtttcattctatcagagactgtccttccctgctgcttgctaagctttaacctgtcctgcagggtttctctttcttctcctgcataactcagaaccacaacaagtgatctaactcacaacatcagatttgaacacaaagccaagtgttatatgaaaagcaaagacagctgatctcctctaaaaactataaatgccagggaattcttctggttttcatgagaatgacataggtaaaggtccagacagagaattcaaaaggatgattatcaatatgatcaaggaaaaaggactcagtcagatgaatgacaatcaggggtcaacaaagggcatgataatggaagtgaataaaaagaaatactgaagaaacctgtgtcttatatgaggctaaaattatttttttttgtaaatcaaatgctcattggaaaggcacattaacacaatggatcacctgaaagagagattatctgaagttttaggtatatatagataatatagtattggaagacttgttcaagtttggccataataattgaaaaacctatgaataaaccatgtgtaatctttggaacaccagaaaatagaagaagaagaactcctttcccatagcatccaatatatattcaatgaatcctagcaaaaatgtcccccaattaagggacagcaaggcacatctagatacatgtagaactccagatatacagggcagaaaaagaaactcctgaagtcatactatagtgaaaatccagaatgtattaagcatatcattttgtacactgcaagagagaaacaggaagaactataaaataggcccttcagagtagcaagtgacagagggcagaagaatctttgaaaactagaggccctaacatgatctggcagagcttgtctgtggctgtttctgatctgggactttatctccatgggacaaaaggagagcctacagcccggactccaagggcatctgagtatcccaacctggcatctttctccaagcttgactgctccagaagacaagcatggtctataacacacaggtggaaggaaggggttgcctcctcttctctgggattctctgtagtccagaagatggccactgaaggaaactcctgtgcccaggatcctccctgagtacaaagctctgagttctcctttcctggtgtcagggctccactcctcatgttatcatacatcttgggttattgaacaagctgaatctagacaccctaacctcagcagtggtgaccttgatctggtggcaataacacttctgtgatggatctcctctcaggaaaggtctttttctaaaactgaaactcagattcaggatgtctatgaagacaagggcagggcagggcagggcagggcaaggcgggagagggagaagagagggagaagagagggagaggannnnnnnnnnnnnnnnnnnnnnnnnnnnnnnnnnnnnnnnnnnnnnnnnnnnnnnnnnnnnnnnnnnnnnnnnnnnnnnnnnnnnnnnnnnnnnnnnnnnnnnnnnnnnnnnnnnnnnnnnnnnnnnaagagaagagaagagaagagaagagaagagagaagagaagatgtgaggtgtggcgttctggtgtcccaggaagaactgcacatagataggaggagaccgtgggatggacagtcggatctccctgagtttctttgtccttacttgtccacacacagcccttgctctctactcttttctgccaggatctgagccctatttatctaaaccatcaaaaaggggggctgtagtcagactaggtttcagtttcgattcctggaaatggctagtttgttggaatcaagtggaaactcctcaaattcttctgtaaataaggtcacaaaggagccaagctgttctgcccctctggattcctctgggagaatgataactcatgtgatatcttctatatctgggaaaattatcctggtgtgagttttgggtttagagattttgcagcctgacttaagttttggttttagtaaattagagcctttttattaaaaagagactggctaagacaaaaccagagcgttttatagctagctaaggcctcaactattgccagctaaaggattctacagggaaagcccacaaagttaatattttggataaattaactcattcttgtctgggtttgggcgaggcttgattctgtaccagacctccagcaagtgccttagccaatcaagcatgcaagcaaccaagcagggagttcgccagtaagcaaagctttgcaggtagcctgtttaatctcaccatccattcttgtagaaatagctggggcagcaaaatatttttcagcaactagcaatttttcaaaaacagcccaaccaggaagcaccaggaagtgcttcagctctggatagctgacagggcgtttcaggtaggaacaaccttctcatggcttatacaagttaaaaacatttttaaaaacaagcctaacacagcaaatttatgctctaaacctattgttcaccattacacttctcagtgagccctggctcaagacttcatacaagaaaacataggagcaatgaggaatggctggtcagaaccctggccctgaaccatgtgtgtcagtggaaagtatgctgaatctcctcagtggtcccacatatatgggttatctgcccatggttaattgtttagaagaagtgtgcaagagtcatttccctgtagaaggaagatgggaaggccgtgagcttaaagtcatcaccttctctccttcattaattacaaaaaaaaaaaaagaatatttttatagttgcttccttcagtcagggtttcttcttctttttcttttttaggtatgagtctgttttgaacatggttgaggtttggtttgtcatgcttgccttgtgtactgctgttctgggtacttagcatcaccaacacctctcagggatgtgagagccacaacaaaatattcatagtgaggcaaagtccttaaagctctattaagtcccgactcataactcagattcctcccactgttgtttgcttgttcctgccccattatttggtggtaccttggaaacggtttttggtttcttcatttttccatattatctcattagatttaagaacccagtgctggggggccactgcataaatctttgtatcctaacataaattgctagaagttcatcgtactaaacattacaggactttcactaatctttccacatttgagttctttaaatatattaattcagaaggtagaacatgtttaatcactcataacttacttacagccccagaagcagagtttgaaagtctatactccccatcgtccttggggacataatcagaagtcaggaggtccagaaaatgcagatgtggcccatagttcattcatctgagctcagtgttctgcatggtcattcaagaatagacataaaccagagtcaaatgaggcaggcagtggttgagttccatgtgactatgtatggatgtaagatggggcaagagagtgaggtgcagactcaagaggtttccagccatttctgtttctgtctttcaaaataagttctttaccatggagccacccccacagccccacagtgttgctacgtaactaggcaacacacttatttgctaaacctacaagaagaatattgtgtgggaacctatgtaaggaagctgtgaacttattgtgaactatgggtggggcagagtagaaaatgttcttcccacaagggatttttctaggaagagttataggaacttttataagtgaagacacttgagaacaaggacatgaagagaattccctggcctgtccacattgtgtctggaaaaagcaaacatccgggggtaggtcttcttggctctttttacaagagcaaaaataaggtgtaacaccaggtgctctccttctctgttcttggatgttctgaagccaactgtagatatcattttatgttttgctttagtaatgaaaatgaaatatgctttgtttccagtcctgagctcaaattcccagagtttctggatgccccagtgttttcggaatacccttcagtccacagagactttgactccctggccatggggggagtcaacaatactgacgtggagtttggaagtgggggtggagatcagatggtgttggatggccagggattggtttgcttatccatccctcttttatgcaatagctatctttattctccatccacagttgaagctggggtttcctcttgcttgtcactgccagtttgtcagttgaagaagtgactatcttcaacagtgcagaggagggacaagtacaagatcaaaagattatttctaccttctgagaattcagtgtactatagactatagtcacccaggcccaattatctgtttccacgtgtatgtacagggggtctaaccctcaacccttctagcacccgcactggtactcaccctgtcttagttagggtttctactgatgtgataacacaccatgaccaaaggcaacctagggaagaaagggtctatttcaccttatacttccacatcgtggagagaagccagggaagggactcaaggcaggaacatggaggaaagaactgaaacagaagctattaaggagtgctacccactggcttgttctttcctggattgcttggtctgctttttatagcacccaggaccactagcccaggggaggcattatctatcatgagttggactatcctacattaatcattaatttaaaaatgcatgacaggcattgtgaggtatgccttcagtcccagctctcaggaggcagagagggatctctgtgagttcaaggtcaatctggtgaacatagcgagttctaagacagtcagagctatgtagagacacactatctcaaaaacaacaacaaaagaaaaacaaaaaaaaaaggaaaaagaaaaaagaaaaaatgcattatacacttgcctagtagccagtcttatggaggtatttgctgagttgtggttccctcttttcaaatgattctagcttgtgtcaagtaacacaacaacactagtcaggatacaccactcccactagagctggcttcagcatttctgacttttcttgggtcttgtctctgaacagtgcttggctgatggaggtgactagtgatcaagtcatgtttagcatgagagatttcacgctcagaaaccttgacccacttctgtatgtgccacacacaccctctgtgagtcacacaaagcttgaaacacccaagaccctgctttcaaaattgatagcaggagcaaaaggaaagtaaataacttgagacttgacagcacaactgtgtccgttttctttctatggcactgcagaggccccctgtggagagtggaagataaacaagttcagaatgcctagcacgctgcttctcttggctgcccctttcctgtgtgcttgacaatgtttctgtttttgtttttttttttctggtttgattattaacaatttaccacagtatgtcactattctaaggaagtgcaggatctatgtcacacatctacacattttaaatgcagagttctgtgactggctatgtctactgggtcatctgtcacataggaacacatacctatcacacacatagacacatataccagctcatagaaatgcacgcatgtatgggtccagcatgtgtacacatgaatgaacacacagctttgtccttgacctaggatgatgtggtcactcaccatttgctttgtaactaaagagagacccatagtgtccttctcagggacattgcaggtgtcttagctctgaattaagcagatctggtttctcctggacattcagacttccagctcattcacccttctcttgtcccactgtaccgtgggagccccatgatgctgaggaatgctctcatagtgataaagagagatggtgccctttctccccttttcatacctcagagtatcttcatggtgaatctgtgacacattgccatataattgagtcacggcttcagttatctggaagccaggcactatacctcaagatttcaatgttcagaactaaattttggctctcatatagaaaccaagaaagagatgtacttggttctcatacaagaatccactaagcatgtgaacgtctgtgtacagaaggagacagagtcactgtgtgccttcagataatcaaaaatcggacccatagaccatggacggtatcaacctcccactctctgcactcacccagccattcaaatggagaataaactcaaatcacacagagctggaaaaaaaagacaccattttaattaacaggagcatgtaatctgttcttcatatctgattacatgtgttaaaattacgcagaaactccgggcgtggtggtacatgcctttaatcccagcactcgggaagcagaggcaggaagatttctgagttcgaggccagcctggtctacaaagtaagttccaggacagccagggctatacagagaaaccctgtctcaaaaatacaaaacaacaacaacaacaacaaaaaccaaaccaaaacaaaacaaaacaaaaaattatgcagaaacactgtcaatataacccaaaccatccatgttcagagacagacttcaccaaggacagaacatgtcagcaacagcttcttttcccaacatggcagcaaatgtctttcctccatggtgataaacgttaaaaccaacaaaacctgtgagggattatctcattgcatcaaatgatgtttttggaaaacctgtcttcactttgtgccagactacgctctcatgagggaatcctgaggtagataaaatgagaaaggaaactaggaagactccattactctctttcctgagttgtcttggtggctctggatcctgtgagaccccaggttcatgggtgccttggggctgaaatgaggttagtcagccacagtgttcctgagaaggacaaggaggcagacgcatggcacagtccttcccgatgggcagtgtgtttcagtcattcactggcgtctttggaaaacccctcatctctttcatccttgtccccaggaatcctttggcttcagagaactcattcccctgatgtcttggccgagtgacccttcacaggccaagtggaaatgtcttcctggccttgaatcttccaggcttctttcattctctgaccaagttaaagtccttttctttttcctggaaatgtttatgctgcaggggaaacaaagaaagagctttagtttcacttttgtttcctgcaaatatatctttcatttttttctctctgctagggctcattgcttcagactttcctgaaggagggcagacccgtgccgttggtggtggctgtgctgtgggctgcagtgagaaacagacccggtattttctacttcttggatctggtgagtgcgaaaagcctttgcacctggtgtgacctaggttttggctttgtgggaagagggcagagctggcttggataggcagcaggtcatgtcaccggtctatcacagataggagtcatgggtctggaactgccttttggtgccagttgttctgtgagagttctgagtaagtttggactgagcagagtctttatgggtgactctcataggaaacgtaccatgctcactgtaatgtggccggatctcaccaccagagagtatggcataaccctgccagctttgctttcttttctttcctttcctttccttcccttcctttcctttcctttcgttcccttcccttcccttcccttcccttcccttcccttcccttcccttcccttcccttcccttcccttcccttcccttcccttcccttctctcttttcttttctctttctttctttctttctttctttctttctttctttctttctttctttctttctttctctccttccttccttccttccttccttccttccttccttccttcctttctttctctctctttccttccttccttccttccttccttccttccttccttccttcctccctcccctccctttttaaaaagtctcatctgtatttacttttttttttttctagatagggtccagctgtgggcctagggtaaatgtggcttttatttcctctcaggaaaagaagttaaagggtggttttctcagttaccccaacctaaggaaaggtgggtgtgcaccggaggctagggctagaattgctggatcattctgacagactcctctgtgtccacttgctggcactcgatgcagggagggtatgggtgagagtcattcccctgcagtagcagctcggttatcaacagaggcacaaggtggtatgtgctggtgttcacaaaatggaaggcagagcacgtgccctgagtgaagagcaggactgggtggccgatccacacccagtgtctgcctggtacaaggcctgactgctgtggctcttttcccaagggcccaaggggccccagaaacatcactgcgtcctatggtcccttaaatgtccatctcaaacttcaccgcctgcccgcttatcttccgggctgctgtgcaggtggtggctctggctggcttgcatgggaggctcaccgctggtagggctagtgacccagaaatggctggcaggtcctttgggggtgttttggcaacaggtgagttctgacactccatcaggaatttccagtcatagatgatttgggttgtgtgtgtgccgctgggggtggtgctgtagtgcctgggcgggagctgcacgcctcatcgagggctacgtggtgagtgggggttgcccagctgggagtctggctgcagctgctgcccgctgatacgtctcctgcacaccgcccacgaccctccagcaatcccgcccagcccgtctcgccctgtatttaccttttaaacagaatgtgatcgggcactattatttccattcacaatccttgctgagttacaagacctagggaaacttagggttttgttctgggtactttggaaaacaagccacttggggaattcctctgtcaagttgttttaacttgtgtttacttctaagactggtacatgcaaagccatcttaatgtggtctactaaggaatccagctcaaaagttaaacacttcagaccacaaacataattaacaaaaatctaagtaatgtttcatcatggacacacgagtaaagctgatttgctgaggtctaaggatgtccatcctgctccataagagacagcacgttaacctccatcctcacacttacagaacatacttgagagaaagcgtggctggtttcttttaagatgctgaaagatctctatttgttctaatgttcaccatacacaattagtaatcagaagtaaaataattattcctcccattcctgttttttctccctgcatttcttcccccttgcttctctcccccacccccttccttaccctctgtctcctctttcttctttgtactgagattggacctttggcatcataaaccttggactatgcaagggctctaccactaagctgcactccaagccctttcattttttatatttttactttaaaagtgtatttatgtatgtgtgtgtgtgcatacatacgtgagtgtctgtttgtgtgtgcatgtgtgtgtgatcacatgtacatgtgcagaggtcagaaaacagttttggagagttagactttccgtctaccttacagaggtgggtgtgtctggtttccatggctatgttgtagactctaggtaactaacctgcaagcttcaggctgcgctctcctaaggctcttatttcaaaggaggattggggaaattaccaatgtgcctcatatttggccttttatgtgagtcccagggattaaaggtcaccaggcttgtaggacaagtggttttacccttcgacccatcttcctggccccatttttacttttcattaccaacaaaatgattttactttggtcactgacacatgatagaaatgacgattgtgttgtttggtttttaaaattttacttaagtatgcattaaaataggttacatttaagaacttttacagtaaaatttcctataagcaagatactttcttaatacattcccctcttttgtttcatttgtaaataatctacacaaccagaaataagactatcaactctaatgatctaaaagtccatatatattttgtagttagagaaagcatacattctggtcttatcaatgatgtgcagtgtgcacttttcttatcaccaataagatgctgatcacaaattgttgtctcctaatgtggtctgttgagagtaacccttcagtttctttggtagagacgccatgagtttttaaaaacatgaaaaagagtcaaagccattttttattagattattttcttcatttacatttcaaatgctatctccaaagtcccctataacctcccccccgcactgatccccaacacacccactcccacttcctggccctggcattcccttatactgggccaaagccattttttaaaggcaaggtttcattatgttgctgatgtagccaagactggccttgaactcacagttgtttcaacctcccaagtaccttgtgcatttagcactgtacttagccaaaagctgatggttgcttagtaacagcagagaagttcatttgtcaaagtccagctccaacagtgagatcagtaatccagggttggtgactaatataaaatagactctctttcgtctctgtctgtctgactgtctgtctgtctgtctgtctgtctctctctctctctctctctctctctctctctcacacacacacacacacacacacacatttggtggatgaagcaaggaactcacaacacaatggcttcttaatcatgaattttaattacacaaatgattacaagtttcatattttttaaaaaacaagtaagtctaaatcccacatctgatcactcagctttttctattacagatgaacagaatttgagtgagacagatactttttaacagccaatttcctttggcaggcagcatttgcggttacatgaaaggaggtagacatcacattattctaactcaacacaattcttattcgtctacatagttaaccatgtatctattcttatactcttttcatagaaaagtaaacatacagttaactagagaactgtaggtcggagaatttttactttctttgagacaatggggaaaaaaaaatctcttcagtctgcatgctgcgcatcacgaagtcctcaaggtgcacaccaagaactcatcagcaaacttataagatcagaaaagtagactttacaacaaacacagaagctcagttttaaccgtggggactgaacctcaattattagtctgtctcctgtaggtgaaactcgtgagccttagtagccaggcttgctttgttcttgttttttgaacttagcaaacatttcatagtaaccaggagtgtgtttttttaattttatgtgttctgtaggttttctgctaggaagcagctggcaaaacatcctaaactattccctaatctcccttatcaactgccctaacttcctatgactatttaaaccaaatcaggaattctgtaagatcgtcaattcatctaaacaacattattctatgaaagttcatcttcattgatctgcaggaaagttgcctaatagagtggctgtctcccatgaagaaatcacgctggactatggacagggagggtctccccaagcccgttcacaccatgcagtcaatattcaggaagaagatagcaatgagaaagcatagtagcagcaagaagtaatccagagatgaagcccaccccccaggcggtgcctctttgaggtacatccctctcagttgtgctaaaccatgggctgtctccaggaagcttccttgcccactttagttcttcctgtatggcatctgctagtgattatttaaacattctaagtctcattaatagctccactataccaaaatgctacaagaaaagtgaatgcttgtaacatcacttaaagatcgatttattatcattttatgtgtttacgtgttttgcctaggcgtatgtgtgtgcctggtgtgatcagaaaaaagcgtcagacccctgtagctacaattatagactgtgagtgctgggacctgatctgggtcctcaggaatagcagtgtgtgctcttaactactgacccaactctccagaccattccaccatcactgaaatggtgtcagataatatacaattcaagaatcaataaaacagattaaaacccggttagtattgcaaaacaaaaacccactgagattctgttatagaaacaaagctgaaccaatacttttctggattttctagaatttatctttgaaaaatcactttggtgggttatagcttaggatagaaataaaagcactattattttagaaaggcatacttaaaattcctgatgcacacttcattggtttttgtttactgaactgaaaattcttgcttcttcagaaaatatgaaatgcctttgcctgcagacaggagcaagttgccctctgagaggctccacccagcagctgactcagacagatgcagacaccctcagccaaaccatagatagagcttagggactctttggaggaagagctacagccagaaaggggataggaactctacaggaagaccaacagaatccattaacctggacctttggggctctcagagtctgaactactaatcaaagaacagacatgggctggacctaggcctccctacacatatgtagctgatgtgcagctcagtcttcatgtggtctcctgaacaactggagcggggactattccaaaagctgttgcctgtatgtgggatatgctcttctggctgggctgccttgtctgtcctcaatgggaaaggaagagcctagcttagcagagacttgaagtgcaaggatgggggatagtaaggagaaggagacccactcagaggagaaggggagagaaaatgggagaaggattgtgggagggggtgaccaggaggggggcagtgagtgggatataaagtgaatgagttaaaaaaaatgaaaattaaaaaagaacttgtttgttttgtgattaaataaccattgaagatttaggttaaagaaaacagtgtcttcaagacacaaaggaactgatgcacacacaaactcagagactgtggtagcatgcacagagcctgcacaggttcaagctggttgggctttcagcactgtgatgaggaagtaggcatgggctctagtcccaacagagctatctccagttaacaaccactcaaaaaggaaaatttagtttctccagaagagtctgcgtggggatgcaaactctctgaagggcaggcccatgcccagcgtagatagccaacagaaaaggaacttcctgacttacttttgtcacatattgctttatttggccttaaaaaaaaatcaaaaaaatgcttaccacttgtatattatgctttacaagtttgagctcttacgatgttggtgtgtgtttatgtgtgtgtgcacgtgtgcatacccatgtgnnnnnnnnnnnnnnnnnnnnnnnnnnnnnnnnnnnnnnnnnnnnnnnnnnnnnnnnnnnnnnnnnnnnnnnnnnnnnnnnnnnnnnnnnnnnnnnnnnnnnnnnnnncacacacacacacgcatttcttttagttactcttcttttgttgttagtttgtagagtttaaaaacccttgtttgtctttttttaatttacctgtctgttttctcaaaggagaaacaaagaagggatggagttggaagggtgaggaaagttggaaagtcatgaaaataactttattttttagtacaaaattattaggtaagcattccatgtacttttatgcaatagacataaaaaggagttttgaatgttgtaaatttcactttatacattattctgtctggcttttatggatataaagcttagaaagaagaactattaaaatcctcaatagattaggttgttcaaactacaagtaacactaatctcaacactgacattgcttttaaaatagaagcttctagaagttttcgttcttaacttaagcatgttctggtttacaccagttaactactttgttctggtttggtttttggtttttgtaggtatttttctgctaaagagcagagtgggagaaatgttttctgtgcttttaacttgaaaagactgtggagcccaaagggaaatagacaaaattcacaggtggtttctggcatcctgtcagcttttcagtccaatgcagcagagcccacagcggtggagaacattaagttcccagtttcatgatggaaatgttaacatcattaggaggttcaaggacagtagaggtgtacgtctggcagacaggttatcactatgaaggaggaacacatgacacacagtaataaggcacagtggggtcattaagaaaacagtggtaggactcacaggagatacatcttttagttttctctgccacccacatcctactaacttacaccaccacagctttacacttcctctgagaagaaacatcttccacaccgctgcatgcagtcatctcactgcacactctaggctgcagtgaaaccttcagcttttcttgcagagcttggtacatctcagtagaactcctttagaatatcagcttctcctgcttcagcagcttctcccacttcagcagcttctcctcctgcttcagcagcttctgggtccattccttgttcagaaagtcataggcagagttcatgcatgtgagccagtattcttaccttattcagatctgcattggcggtagaggccctggcacagacacatggaggaaagcctggcctggaatggaggccttccattgtcccggccaatcacaggggtgactttcagcatcaagtgggcccctgtcagcagcctaaggatggtttgatttctatgttttaaattttgcagtagtcttcccaatttgcacaagctgctcgtgaactccttctggaggccaggtaggcctggaacttgctgctttcctgcctcagccttctgactagtcagggttataggatataataaaattaatatgttggttttattttgttttgtttgagagctaaaagtagttctttcttgtcctaaacattgtttttgaaggatctgcatgaggaaggagacagttgttctccattcataaaccctttgtcttttcgtaggaacgctaatgtattagtggatttgaggtgttgagtatgctgattttaccactggccattgtgcacttgtgtggatatagctcctgttataactccatgagtatgggcagttactatggggcaattgaaacaacagaaatttattctcttttagttctggaagccagaaatctaaaattagttcaaaattaaatttgcgcttgagtttatctgaataatgcaaaattttagccctacctgaaaactgttattcacagcagccaactcacttctgctgtgtaaattatatattcacagattctgggggggggggggttgatgtggacatctttgggatcattattctgacagtgcaaggggtggttaccctctcctgaatctgagacacagaaaccaataagaaagagaataagtgtgtcttctcctgtaatataaatgagttacactggcatgaaccagcctgtgaggacaggagtggcccacaggggctattatgtctggaggggcaggtttctcttttatcaatcctctctccttacctctttggtctttctcccttctcacagagcttccctggtaactgccatggatcagttcatctcagccttcctgaagggtgcttcagaaaatagtttccaacaattagctaaggagtttctgcctcagtactctgcattaatcagtaaggcaggaggcatgctctctccagaaaccctcactggtattcacaaagccctccaggagggaaatctctctgatgtcatgatccagattcagaaagcaattagtgctgcagagaatgctatcctggaggtggctgtgatcgggcagtctgggactggcaagtccagttttataaatgcccttcgagggctgggccacgaagcagatgaatccgctgatgttgggactgtggagaccactatgtgtaaaaccccctatcaacatccaaaatatcccaaagtgatcttctgggacctgcctgggactgggacacccaatttccacgcagacgcttatctagaccaagtgggatttgccaactatgacttcttcatcatcatttcttcttcccgcttcagcctcaatgatgctctcctggctcagaaaataaaggatgctgggaagaagttctactttgttagaaccaaggtggatagtgacttatataatgaacagaaagccaaacccatagctttcaagaaggagaaagtccttcagcagattcgagactactgtgtgactaatctcatcaaaactggggtgactgaaccatgcatcttcctgatctccaacttggatctgggtgcgtttgatttccccaagctggaggagactctgctaaaggagctccctgggcacaagcgtcatatgtttgccctgctcttgcccaatatctcggatgcttccattgagctaaagaaacattttcttcgggagaagatctggctggaggccttgaagtcagcagctgtgagcttcatccccttcatgactttctttaagggctttgatttgcctgaacaagaacagtgcttgaaggattaccgaagctattttggcttggatgatcaatcgattaaagagattgctgaaaaattgggcgcacccttggcagacatcaagggggaacttaagtgcttggatttctggtcccttgtaaaggataacagcataatagcgcaagctacgagtgctgctgaagctttttgtgctgtgaaaggaggccctgaatcttctgccttccaggctttaaaagtctattataggcgcacacagttccttaacatagtggttgacgatgctaaacatctcttgagaaagatagaaacagtaaatgttgcctagctaaacagtgaatggatttcaaattgtgtgtccaaattggcaatggggttggttgtccttccaccaaactcccaggccagctcttccctaagctccacagaagtgtatcccatgaaggaagtccattgcttccctctagagattactaccatgcatgaattgttttttgctcataccctgtttcctgtgttcattgatttattattcttgataatagtcagcaataacataccacctgcctctgtgttaagagataacctgtttctgatccatttgtaccaataaaaaaagtttgtaataacaagatgagacttagacatcactatctcctaattctttttctcatttatcatctcaacaccctcctcgctgaaataaacaatggtctataaatatgagaacacggttaaaggcatactacaactttacctgtgggaaagtgcaacatgcccaggaggtggtgacaagatgaagtagtgacataggagaagacccaggaaagaacacgatgagtaagaggtcaagggggaatctgcagttaggagtacagcacactaatgtgagaagagctggttgtagaaacggcagcaatctgatgggaactaaggaaagtaggggaagtcagaggatgaagagaggtagagaggaaactggagtcacttccaagaaggcctaacatatgagtttgctttttttcctcaagggaggcagaaagcaggttgggtagaggaatggcctggcagagctcccccatggaggatcgctatgcttgactgtggagagatcaaggttgagctctcacctccaggagtctctgtcatcatcccagaggaggtcatgatggcggtcggggttcaggaggtagtgatggaaacaggaggccatgatggtggtcggggttcaggaggtggtgatggaaacaggaggccatgatggtggtcggggttcaggaggtggtgatggaaacaggagcacttgctttggaataaacatggagtatggagttgctgacccctaagtgatctggggaggagcatccctactccctggcaggcatagagaggggtggagggagctgaagtgaggcgaggggtctggggtttagctacattcacatagtcaggatcttcctgcatatactgactagaaggaggggtgtaaataatgtgataattgaggtagggggaatcctgatattctaggctgagttgggtgagtggacacagtgagatcaaagtcttggcaccctggagacaccccgacttccaggtctcactgtggagagattgagctggacctttctactttatatttcattttttcaataccggtaactcatcagattttttttttcttttgcctttgggatgaagtgtctttcctttatgacttaaggctcagatgcaagttcaccgataaatcccattcttgaggctgacgttgttgtggtgagtgtagcagaaacttagataggacctatcctttcttcccatttggcctgagacgtggccacagtctctccatttcaaggcaatcaccctggaattccaaacaaggtggtggagaaacacgtggctgttcagtgctctcttcctggagggtgtgaaagggttgggtttgggtttttgtaatgaaacacttagaaggagaagctagaaggtgtcctctaaggggacacgtgtggtacaccattttttctcctcagggtctgatggagtgtcagaggggttttgaaagatcagttagccagctggtggttgatggctcagtgggtaaaaagcatttgccccacaggcctggagacctgaaatcaaatccctggacccatgtaaaggaggcaggagagaatcaaccccgcaacattgttctctgacattcacacgtgtgctatggcacaactatccatctcacacatgtgctatggcacaactatccatctcacacatgtgctatggcacaactatccatctcacacatgtgctatggcacaactatccatctcacacatgtgctatggcacaactatccatctcacacgtgtgctatggcacaactatccatctcacacatgtgctatggcacaactatccatctcacacatgtgctatggcacaactgtccacctcctcccccccaaacaacaaaacacatacacaaataataacaacagcaacgataaatacaaaaattagaaaatgaattagatggcactgaacatgtgcctgttacaatttggcaaaagtaaagacaagaattagattacctagctgagccagaggaaaccttgctggagtagagtgacatgtggtccgtgtgtcccatctgactcacttgcaagagagggctgctgaagagtcatctcaagccctttcctgaggcattctgggaaggccagcttcaactgtgatgtgcatatgaaagaacatcgttattagacattgtgattctctcatttgtgaagcctagatttaaaatggtgtgtgtgtgtgtgtgtgtgtgtgtgtgtgtgtgtgtgtgtgtatatacacttacatgtgaggatgcatttgatggtcatgaaaccagaaaggggatcgtgaaagaagtgctcttatggccagtgggaaatagagatggtagtggaatacacacaatacaaaagcagaaattggaactaactggggaaagggagggagctggctgtggggaaggggtcatgcgaatggcaataggggaggggaatggatgaaaataaagtttaatgacatatgtgttgggattcagacccaggacaaggggcctccaggttctcccagcattccttagtccctacctgttatgggacctggctggcatacctgccctctgccttgaactttccagctgaggggctgggcttcccctacccctacccctgaagctcttacctatataatgtagacattttggtctctctatccccatctctctccctgcatgtggactctctctctttctcttcccccttctcctctgtctccttccccatgagggtctacaaggtcaaagaaggatcaaaaagggagctggaaaccaaatgatggtgaatcacataatatccaaatgaatggactgcggctgaggtaggcctgatggaaatatatagttttaaatgactgtattaaaaatacaagagggggggtatgggggactttttggatagcatttgaaatgtaaatgaagaaaatacctaattaaaagaaacacaagaaaaggtggacttggtaaagagccctgatgctttaaaagggttcagcaccccccaccacgtccccaccacacagtttgcaaacttgaagacagaaaaacaaaatcagtctgagaggacgtggagaaataaggatcagagcaggacagaaaagattggcaaaaatcaatggaatgaaaaacagaaataaaaacgaaagcaacataactggctggtcctaggtaagttgtaggagagattttattgtagataaaagggaaattgtagtcagaggcagagacatctgggagagtccagagtggtaagagcatactgtgctgaatgtaagagagaggggagaagcacccaggtgtagcaaccaggaggcccaaaggtgcaaagagagtgggtaaccaaaagagttgaattatttagggaagagtggcccagccccctaagcttgagagttggtggtggggtcatgaagcagagggtggtggtgggtggggtggtggtgggtggtggggtagtatgccagcccagtaacaggctggactgaggaattcggggaaaacctggtggtcagatccattttgaattgttaaataggcatctcggtcaaaaggctgaaacctgacataccagccttttggttgataataaggagctgattctacttcctgctgacattggtgctgattggtaggttggggtgggggtggggcaaagaagctggcatgctgaccaaatccaggaagagaaggttgtttcacttcctgaccaggcccagaaggaccatctgggacaaagaaagtgcaggtagcattttctagcagtctgtgagactggaccaccttgtgctagctgctttgaagctttgaagctatccggggtgcagagttttttaagggggtacctggagctggcactggagcagtctataattgattttaaatcttctaggacaggtagactagggagaaagggtaaatttaggacgtttgggggaactttttttttaatctaggtgtgcatttgaaacttttagacccacagttctggtagttggggagggagtcccaagaccaggggaaaggggagagtcaccacccttatgaataggcaggaaaacttaggatgcttgttgtcaggagtacttatctggaggccatttgacctgcaagagctggattcaagttgactccctgaagcttacaagagattttctaagtttataaaaagagattaaaaagttaccactgcttataatctgtactgaaatccacactgtagaaaaggcagtagactttgagtcatagtcatagtaaaaacttggggactcagaaatgttttgggttaaaagcatgaacactctttgtccagaaggatgggtgtatgtagattgggctagtcagcttattaataagtttcaagcactatgagagggcagatattcatctattctaaccttctaaactatgtacatcccaggcacaggccctgcatcgctcacagtctttgagactcaccggggtttgctctgctccatgtgggtcctcagggtgaaacccttggtgacctgcatgtcatgtttcctatgggccagcctctgggatcagaagtcctgcattctctgatcagcttttcactgaccaacccggtaagggaaaacaatgtttacataagatagagaccagagatggttggccctgccgtcatccggaccacaaccagatgtctgagcatagaaatctgcatctggatacacagaacacaaaaccatcctctaacactaacaaacatgtgactttctaccacaggctttaaaaagcagaacactgggtgcagggggaggggttgttcctataagcaacagagggagctgagagccaggactgcaggtgggctgtggttcctaggggagtggggaggagctaggagagagcaggggaaaagggagccagtgtctttagtagagagactcagatcagatcgggcgtagaaagttgtccatgtggtggggggtactaatgggcatagtagcaggttccaggagccacagagaaacctacggagctccaagtgggaggaagcaaggaagggtcccagactgctgcagacggccctgcagctcctgcagtagaggaggagatgggagagactaggagaaaagggagatgtcctcgtgggtgtagaaggtcagaggtattagcaggctgcaggaccaagagaggtgtcccacgtggagggcacagcgggtgaaagcagcccttagagagccgctcagactctagagcttggaatcaacttttgtgagtggcagaagccagcagaaacaaaggatgcatacataacttaggagagtctgaccagcagcgtggttcagagcagcccggttccctcttctccactttatcctgtacgggctgcttgctccggcttttgaggtcctcaccattgtggcccacatgctctgccttgggttttcactaccttctgaagggcccactttgtacaaatcccaacatgaccacggtggtcgtgataactgtagacatctcagccattatggcggttccattggatagtgctatatagtgatgcgaatccggcagaaacagcgaggcagcagttgaatttgggtccttccccaggcaacctcacgtgatgataccttcttgggggggggggagggggcggttgtcagccacagttctcagcctgcctagcagcacgagggcacatggctatttgtacagttacctgcacattttctccttttgcatacagatatgtaacatattacacgagatagcatacatgttaccgtataccagactgtaagacaatttcatccaactatatgcaaatacatgctagcaacttaagtaggtttggcttggctgtgctattccatagattagacagatgaaagttatttttatactatttgcaactgactaaggacatactggtgagttgttgggaagcattcatattaattagcaacagtatcgaaagaagacagtttaaggaaggagaggttaattgagcgcctgatgtgagagaaaccacagaagcctgggcagagtggcttagtccctggtgtggcaggcagacctgtgtggcagaccgttaacatctttgtggaccagaaattacaaagagtggggatagaaccagtggctggcttgtcaccttcaaagagcaatccctgatgacttccttctgccagctaggacccacctcctaaaggacccagagcctcctgaaatgacagcagcggggggaggggggcagcaagcattcaaagcaggagaccatgcatgggggaggtttctgtattaagccatagcaacaataaagaacggctggggagagctctgaaaagtgcagacgggaaggtcaggtgttcaaggtcatcctggtgccagtaacaactgggctatgtaagatcccctccctccaaatccaaacccaaatcaaacaacccaaaatacaaccaaggaaaaaaaccaaaaaccgaaaagcaaacacactcaaagccagagattcctttcttactcgcaggcctggttcttgcttcttggctctctgctgcccccatgtggctgtttgctttcataataggtgagactactctgagccactgaattccaatacaatccttcactatggccctcgaatgaacttgtcctaggtaaagtgcggtgaacaagtcttcctcgtccatgggacaacatcaccccatttcccacatcagtaagtgacaggtctgtctggttactgcactggagttactttcaagggctagctttcgataacttggtcattccgtctgtccgtccgtccgtccgtccgtcagaagctcctgccgacccttctaaaacattcccattcccaactccttcacagctgccacttcccacctgacaccagcacttgtcactgtcactgtgcatgggtggcaatgttccctaacggggtttaacctaatttagttatgttgtgtatgccagcacctctggaattccttgtttggcttttccatcattgcatagcctgttcctatctcaggctattaactctatatttgtaagaatgaaaattttattatgaaagaccttcatcagaaaccccacccccatcaccacccagtgttataaaatgtaatgtggagatgggcaggggtacctggtgggctcatgccaagttgcccccctgagaaatcatgccacgagacagacctgatataagggaggtctatttggagaagagagggggagagaggacagactggagagaggaagagaggaaggggtagagcagacagacgggagcagagccataaggtcagtgaagagggaacacaggaggacagaaagaaggaccaaaagagagaaagagaggccagccacgaacaaacatatgggaggagagacagggaacagggatggggagaaggaggggagagaggagagggagagagagcgagaactggagttgcaagccgtcttttttgtacgctactggtgtgcaacccacatctggcagcagataattgtggcaggtggtgatgtaagccactggtaagtccctgggaggagcctagcagtatcacctgtaatctaacacccagttctattacatagctatatcttacattgctacagaatttagttgatacaaatttaatgttttcactggtatgaattttttattgatataaaattaggattagtattgtcactcttacataggcacagcttatattcatattatttgagttgtgttttcattgctggggcatatttgggttgaagatttactgcaacacagtcctgctttctttctggtcccctgtaattctctcgtgtccagtcccattggccaccacatgttctcccaacattgaaaacagacaccagcttcaaggccttgaccttccagtgttacatcacacagaggtcttttcccagacatgttcacgccatctccagtcctcactgaacactcccctcacaccctatttaaaggtgactttttcttccactctgaagctcttttctgccttgtgtggcctggcaagcagtaccagtgtatggtatgctctgtctacaaaattttgctaacttctggtcctcactagaacttatgtttcctgatgctgcttttgaataccatattgatcccaggctcttaacgaagtgactgttatgttctcagcagatattctttggctgaataatatttatattatccagaaaaaccttgtgaaaatttttgtttcggctcacatgtttcaactctgtgtgctgggtgtttaggcggtggttttgttttgcttcctttggatgagagcattaagaagccgcttcgtccccacactgttctttggagacaacatattctgtgtcccatatcagcactttgtttgtttgtttgtttgtttgtttgttttgagacagggtttctctgtgtagccctggctgtcctggaactcactctgtagaccaggctggcctcgaactcagaaatccacctgcctctgcctcccaagtgctgggattaaaaccaccgcccagcacagcacttttcttgatccccactttcactgccttcctactgcacacaatacttcaactcagggacccacggatggtctcacagacagagagaaagaaggtaaggaaacattaataagacattaagaagggctggagaggtgactcagtggttaagaacactgactgctcttccagaggtcctgagttcaattctcggcaaccacatggtggctcacaaccatctgtaatgggatctgatgccctcttctagtgtgtctgaagacaatgacagtgtactcatataaataaataaataaataaataaataaataagaaaagaaagaatgggaaatgactcactttctcctttcctccaacactccaacaacagtaggacagacaataggaggaaaaggatgtgccaattcacaaatagaaactgaaaaatgaaccatcagcttggcatagaaactgtgaagttaggatggaataactgggaaatgactctcagttatctttggttgggtgtcctgaagaaaacctacctttagagggagttctagcattaaaataaccattttcctcttcccctacttgctcttactaggtgagagggccagggaagaactgctccgtctgacccaagctccctccttggtcttcactgacccagagagagggaatagggaacacagcatccatactcatgaatgtctgggattcatcccataccctgtggcctatttctatctggtcaggaggtttgcttcataggtctacacccattgtggctgccatccctcatagggtatagcgtacaggaccagagtgcacatcctttgtgcccgccatccttctctagtcttgctccattgtgttcaccccaaaagtgtcccagacttcacaataaactttatggtcaaagttttaattttttgacatgttccacacgtgtaagcctaccttttcactgaccaatcctgtctgggaagactaatgttttaccctgtgacctctacttcccaagagcagagattcctccaggcttatggtaggacaggaatatgggacaagtgtgaatgtgataggttaaacatctgctctcatggaattgcctgcttagttttagtaaagcacaacaaatatacagtttttgacagtgtgaaatggtcacaacaaaccccactttttacaatgtatatatgctaaggaaaataaaataagtggcataatacttttataactaatgttagtgtccctgattgcaaacttagaaaattatgaacaaataatggagagggaaaaaatgcatcagagtacaggaaaactgaagaatcaggaaccataggagttgatatacttggtctagtttacacacacttaatggggggaggggagagatggctcagcaggtaagggcactggttgctcttctggaaaacttgggtttagttgccagcatccacatgggaagccttttattcttctctcttacattacctttcctccacagtttcccctccctctgcttatccca

SEQ ID NO: 227 - DNA, 1728 bp, Mus musculus
tgagaagcgtttcctccatcttcactggctcattgcttcagactttcctgaaggagggcagacccgtgccgttggtggtggctgtgctgtgggctgcagtgagaaacagacccggtattttctacttcttggatctgagcttccctggtaactgccatggatcagttcatctcagccttcctgaagggtgcttcagaaaatagtttccaacaattagctaaggagtttctgcctcagtactctgcattaatcagtaaggcaggaggcatgctctctccagaaaccctcactggtattcacaaagccctccaggagggaaatctctctgatgtcatgatccagattcagaaagcaattagtgctgcagagaatgctatcctggaggtggctgtgatcgggcagtctgggactggcaagtccagttttataaatgcccttcgagggctgggccacgaagcagatgaatccgctgatgttgggactgtggagaccactatgtgtaaaaccccctatcaacatccaaaatatcccaaagtgatcttctgggacctgcctgggactgggacacccaatttccacgcagacgcttatctagaccaagtgggatttgccaactatgacttcttcatcatcatttcttcttcccgcttcagcctcaatgatgctctcctggctcagaaaataaaggatgctgggaagaagttctactttgttagaaccaaggtggatagtgacttatataatgaacagaaagccaaacccatagctttcaagaaggagaaagtccttcagcagattcgagactactgtgtgactaatctcatcaaaactggggtgactgaaccatgcatcttcctgatctccaacttggatctgggtgcgtttgatttccccaagctggaggagactctgctaaaggagctccctgggcacaagcgtcatatgtttgccctgctcttgcccaatatctcggatgcttccattgagctaaagaaacattttcttcgggagaagatctggctggaggccttgaagtcagcagctgtgagcttcatccccttcatgactttctttaagggctttgatttgcctgaacaagaacagtgcttgaaggattaccgaagctattttggcttggatgatcaatcgattaaagagattgctgaaaaattgggcgcacccttggcagacatcaagggggaacttaagtgcttggatttctggtcccttgtaaaggataacagcataatagcgcaagctacgagtgctgctgaagctttttgtgctgtgaaaggaggccctgaatcttctgccttccaggctttaaaagtctattataggcgcacacagttccttaacatagtggttgacgatgctaaacatctcttgagaaagatagaaacagtaaatgttgcctagctaaacagtgaatggatttcaaattgtgtgtccaaattggcaatggggttggttgtccttccaccaaactcccaggccagctcttccctaagctccacagaagtgtatcccatgaaggaagtccattgcttccctctagagattactaccatgcatgaattgttttttgctcataccctgtttcctgtgttcattgatttattattcttgataatagtcagcaataacataccacctgcctctgtgttaagagataacctgtttctgatccatttgtaccaataaaaaaagtttgtaataacaagatga

SEQ ID NO: 228 - protein, 418 aa, Mus musculus
MDQFISAFLKGASENSFQQLAKEFLPQYSALISKAGGMLSPETLTGIHKALQEGNLSDVMIQIQKAISAAENAIVAVIGQSGTGKSSFINALRGLGHEADESADVGTVETTMCKTPYQHPKYPKVIFWDLPGTGTPNFHADAYLDQVGFANYDFFIIISSSRFSLNDALLAQKIKDAGKKFYFVRTKVDSDLYNEQKAKPIAFKKEKVLQQIRDYCVTNLIKTGVTEPCIFLISNLDLGAFDFPKLEETLLKELPGHKRHMFALLLPNISDASIELKKHFLREKIWLEALKSAAVSFIPFMTFFKGFDLPEQEQCLKDYRSYFGLDDQSIKEIAEKLGAPLADIKGELKCLDFWSLVKDNSIIAQATSAAEAFCAVKGGPESSAFQALKVYYRRTQFLNIVVDDAKHLLRKIETVNVA

SEQ ID NO: 229 - DNA, 173959 bp, Mus musculus
  misc_feature (1)...(173959): n = A,T,C or G
agtcgcgcgtgggctgaggccctgggcgggcgttgcgaagacttgtttgcttgagtttggaccctgcgacagttctcatttccctcccggtggggctggcgtacacccggagctggagaatgggcagctagacgcaggctagggagcctgtggctgcggacatgaactcgcccgtggaccccggcgctcggcaggcactgaggaagaagccgcccgagcggactcctgaggtaaggccgggcactggcgagcactgctcggccccgacctggccgtagccgcgcagggtgatgagcacctttcctgccgcttcctgccggggacttccttgtacttgtgataagaaagcaccgttactgttgactggcttctgagtttgtgtgtgctcaggtgggctgaaaaacaagctgggaataatgatgtgtaagagacagttcataccatagccagtgtgtgctgtgcgttcatctcagatactgcacaattgcccccagaagacaggtttccaatgtccgtatcagactctgcgtcagccagatagtagtaagtcccgtggcgggtgatgcgtgtcgagtggttccctggtgctttttcaaactttccgtgggaagtttaagattatttgttaagttttcttggtttgaagacgtttctataatcttagtggctatgtgtattataccaaaattaaaaaaaaaaaaaaggaaaacccaacagcaatgtaaatgcaatgagtcgtcttgtttgaagttgcagtaactgaaatgaaatgttttaatttttagtcacgggagtttcatacttagagttctttgcatagaaagtctcaaactttgggtaacactctgggacatgactttgttacagccattattgaagttgtgatgtgtccagcttgcttcctgaaaccttgatctttgcatagtaacaaggcacctgcccacccctttccaggggctactttttcctacttataatttatgaatcagcttttctgtggtgattaccattgtaatgtgcattttaagttttatttacgaacattatttaggtaatgaaggaaaaccttgtttctcttcaggtaccgaattacttagtttgaaattgagtctttttaagtagaggacgttttctcaactgttggggaacttatgcttggtcatgtgtgctgtgttgaggacttttatcttgtgttactggaatagcaacattgttgaagggaatattaactgcttggattcattggctgtatttttgaatgagtgtagaatttaggttactaataaatcattatccagagtgctagtgatgctttattttgacaaagagttctatgaaattctcacaagttcgtttctgctgtcaaaagattctcgtagtggactcctaagagtctgttataaatatattaatttggtaattattcattgccaacctgttcaaggctctattttgtacattagaaaattttagtgggcacaatagacaggtccctatagttcttacatcctgatggattaaggaattgagaaggtaggtgataaatatgcaacatgctagctaataatggctatttccaataataggataaggagaattggggaaagggaaaataagctatttcctaggtaacttgacttgcttgttgaacgaaactgggtatccctgtgtagctcacagcaacctggaaccataacttgtcggcactttgcttgtatgaagatggtagtgaccctcaaggatctgacttgatgaacattctattgatgcatacgaatgggattatgtgcagagttttatgaggaagaaagcttatgcaaatggaggaaatggtcattgcaaagaccctgtgattagagtgttctgttcatacattccaggattaacagggaactcttgaatagtgggcaatgagccagagtgggtaggaagtcctagatagtgctgtaggataggacacagcatataggactttgtaaaatgtgagggttgttattactactactgctaccaccaccaccaccaccaccaccaccaccaccaccaccactacaactacttttatctgcagtgaaatgggtgagctaccatctgaaggttttgaagcagtggaatgaaactgtcttgatagattttcaaaaagactggctgttatgtagagtgtagaccaggtggaaacaagggtaggagcaggaagttagaagctattgcataaatggggtaagagatgatgatagttcagactaaaatgacagccatggggattctgaatagccatcaacttctgaaaatatttttaacctttagccaggagcctttgttaataacatagactaggtatagactgaaggataaagaagaattgaacatggtttcagagtttggggtctaaattatggagtgttgaagttgttaccaaagacaagttgaagagttatcaaagaaatggccttggatgtcacgaagtgatacaatgcacacctagtgtcatgagatcctggacttcatcctcagcaccacaaaacagaaatacaagagatttaccagagctgatttttgtgagggggtaatatcacaaattatgttttcaatatgtctaatttaaaatatctgttagaaatgttggagtaaacatttagcacataaaagctatgtttctaagagaaggctggactagagagttaaaatttatagtcatcgggttgtagattgttttcagttgggagaattatgaaattatcaatatagagtgtatagagaatagaagaggtaaaatttacagtcattggaatgtagacattttcagttataagaatatatgaaattaggaatataaagaatatacatagaaaataggggtcacacattatgatcccagcacctgggactctgaggaggaaaattgccattgattccaggcctgcctggtatgaatgaggatggatgtgtttgggtatgacatgtcttagaaaaaaaatgttagaataaataggtagattaagagacagaggggttggagagagagctcagtgactaaaagcattcactgctcttcagaggtcctgagctcaattctcaccaaccacatggtggctcacaaccatctatattgagatctgatgccttcttgtggcatgcaggcatatatgcatatagagcactcatatacataaaatacataaataaatcttcaaaaagcgagacagaaacagacacatacacccagtgtatagtgatatcatggaagccaagttaataaaagtgcatgttctaggagtgtagttagttgtagagcatttgtctgtcacatatgaagccttgggctcaattctcagggtaggattgggggattctatttttaaaagctaggcatgataacacatgtctggaataccagcatttaggaagtggaggctacagcattaagagtaccagtccagtctgggctacataagaccatgtttcaaacaaacaaaaaccaaagttacaatggaaggggataatattcctgtgttaagcttaatttagttccttttccttgaatatgtactgagtgcaaagcatgtgaaaatatacaaataggcaacattatggtttgaatttcaaatcatctccccctatccatacacacatataggcttctgtgtttcaataccttgtccccagctggtggcaatgttgttgggaggttgtggaacctttggagcagatgtgggtcactggggataggtctttcagtcatagtccagccttacttctagtccacgcttgctcttttcttgttaatcaccaaacatctgaggagcttttgcctcactctctacccttctttactcacagcatagatccacccactttagccatcctgcattccctgtggtggtggactgatagcccctgaaagtagaaaccagaataagtctttactccttttaagatgcttctgtcaggaagcaagtcagaatgtaaattgctaatacagcagtgtgtttgtttttgagacagggtctcactgtgtagcgtagactgttctctaaatcattattatctttttgtctcagcttctgaagttcttggattataagtgtgtgccaccaggccaagtttagaatcagtgtttttataactttgtaataaatctttgtgtactagactctgaagtatgacatttagataactttctaaaagtttttacttctctagctctttgtcctacttttgggatccaagtttcacaacaaattgtctttcctgagctctctgatttcctttcccatttttaaaaaggatttcttatgggaaaatgtgggcttaagtactggtcttgtaattaaaagtgttctaaaaccacaaaagctattaaagagatatggattcaagtagaacacctaactagcatgtgtgggacctggactttagcccagccaaaaacaggtacacaagtctatagcactaatattcagtcaacctgaaaatagtgggttatttgagcacacaagtttaagtctaacccagacaaagtagttgagaccatgactcaaaaaaaaaaaaaaaaaaaaaaaaaaggctttactgtattccaaaatgtttcctgagacttctagtagctgtcatagtgtcttagtattctgtatactgtgttatttgcacaggaacagaatggactaatgatgtgtttctcagaattttctgttacaaacttaagctcactttttattaataaatactaggtcaatctttcacatcttaaattagaaccttcaaaatggcttataggccattttcatatttatacatggcccatgtattaattctgatacatatacagagatttgagatactgtgcatcatgccacattctccatctctgctttgcacagtatatatgtggtataataacagcctcggaatttaggggtttgttttggtgatagagtctatgtagtccagactggcctcactttctgtatagccagtactgccctcaagcctgatgatcctcctgctttagcctcccaagtgttgaggctccaggctcgcatggtcatgataccacccattgcaagtcctagatcccatttcaatactggtatctaatatttttgtatgtgtgaacttttcctgagagaagtaaatgactgctcactccaattaggttaccaacaacaggacaaagtaacagttctatccaagtatatatagtcctactattatgtgagaaaaacaaacaagcaaaaatagctgcatcaccaaaaagtctcattgcgtgtggttgataacttcctcatagatccctcaccctccttgagttaaacttccaccctttatattctaagcaggtgtgcccagccacagcccatgtttgccacgactggcctagaatacagtccaaaacaaaactgaaaacttactttgaaaaaaaatatgatttcccctcccctacttcctttaaaagataaaaagacttaggttgacaaacctgcaaattttcctatttttctaaaaattgaataagagctgaagagatggctgatgattaagagcccttgctgttcttccaagggatctgtgttatttccccagtcccctcatcaggtagctcacaatcacctgtaactcctggaccagggaatccaatgccctcttaagattttggcatcttaaagtgcatggtatacacataaataaaacaattcttaaagatgaataacatacagtcatcataaagaagctgaaatagcttgtaaaatatctggttgtgctgaaagacaattcaaatagaagaaacttagttatattttagaatagaaatttcttttctgtatggcttcaaaacgtttttttaaagaaacatcaaggagtattacaaataaatgacagttttaactttttagattttttttttcaaaaaggagtttgtagggagctgaggagaagaagtgctatgagttcaagaccagcctgggctatagtgtgagaccctaactcaaaatgaataggggaaaattttgccagccagaatttcatgctcatttgggtgctagtacaattctacctcaaatttaaaaataacaaaaaataagacttacaattatttcttaaccttcagattttagaataatggtctgtgactctaaacctgtagaatggatcccctcacccccaccccccacccccggacctggcaaaacaccactgatgtacttgaatcatttttgagtgagtcactttgcacactctgagggtggctgaacaaagattccgctgtgtgtttcccagccagtgtacattcagagggttcttggggggtgggaggaggtatttatacttctggaccctttgaccttcatttgtaaatccaactaaatataaaaaaaaagtcagatctagatgaaatctttattaaagaaaagctgggggctggagagatggctcagtggttaagagcacttgttcttccagagaatgtggtggttcacaaccatctatagctttgtttcctgaggtttcataccctttaacaggctctataggcaccaggcacactccacaaccataaattcaggcagaacacccattcatataaagaagaaaaaccatggccaactgggagttcggaccatgtgatttttgtttctgagatggttaggaacttaccttaattctcccagaaggaaaagcagccaacatgatgagcttcatgacatgaggatctttggaagggatgtagtgaatgtgagtgctatgaactgttcatcattagacaagctgagttagttaaagtagggtgtgactgtacataaaaaacagaatggtgacttctggcatggcagtggaagctatcattcatgctaccactaatctttcccactcctgtctaccactaaagcttttggacaagtgcatagggtcaagaattcacactgttggcctggagagatggctcagctgttaaaggctaggcttacaaccaaaaataattcacactgtaatgaagtataatagagaggtgcactgtcttaattaggatttccattgctgtaaagagacaccatgaccaaggcaactcttaaaatgtacaacatttaattagggatgacttacaggtggttaggacaaagctatctcaaagcctacccccatagtgacatactccctccagtaaggccacacctcctaatagtgccacttcttgggtcaagcatattaaaaccttcacattccactccctgaccccataggcttgttcaaacacgagtctatggtggccatacctagctatagcataaaacaaaatacatttagcccaacttcacaagtaccatagtctattacagactcaacaatgttaaagtctcttctgcgattcatgcagtctcttaactgtaataccttatagaatcaaaatacaaaagcagatctcatacttccaacatcataggatatatatattaccattccaaaaacttcatggtgaggaaatactgtaccaaagcaagaccaaaaccagctggacaaactccatctccatatctgatgtccaattccgttctgctttgttgactacagcacaattctctttggctggttccactccctcttaagcagctttccttggcaggtttcccagggctctggcatctcaaatatcttggggtctccaagacaacttcaacattacagcattttgttccaatgcctggaacacatgatcttctgggcttcttcaaaaggcttcagtcacatctctagctttgccctctgtatcactctgagccctggttgactccattccactgctgttggtgttcttggtgttcatctcatggtattggcagttttccactgcaactagacttcaccagtagcctctcacaggctctcctcacagtgccaagcttcagccaagtggctctggctttagagtcaagaatagaaggaactactgggacaattgatactggttagttggagctaagaaattggtggtgataagagaccagcataactgaggtgaaatcttctttgcatgatcccttttcagtcctctgctgttaactgaagcttcacctttactaatatggcctttgctagcgtcacacagtgccaagcctcagcttcttcccttcatgccttcaaaactatctctggaaaacagcttctttgtgctctcagaagacacttcccagaagattaagctctctcaaagcccacccccactgtgacatacttcctctaataaaaccacacccaccccaacaaggccacacctcctaataatgccattccctggggtaagcatattcaacatactacatacacttctaactttgataactttgcttatatggtgctggaagcacagtttgaaatgcaccagaaggaagattactaagctagatcagatttgataaatggaataactaacatagcagtgttcgttcctggagaaggagagcctaaactacaaatcagtttccttgacttgctaagttttgggtgttgtttgttttgttttaacctgttctataaagttaagttcctattaataggaaatgactgaagatgtgcacccatttttctaagctaatctttgagactgtctttgtgccctagatgacctggaattgctctgttactcaggctggatttgaatgtacaaagatcttcctgtctctgcctcttaagtgctggcattaaaggtgtgtgccaccacacctgtctgtttgggtttttggagactaaaaaataaaaacatttctgaatttaaaacaaaacaaacaaaaaaacaacaagaagaagaaggagcaaaaaaacccaaaaaaccagaatggttatcctagctcacaggaaggtgaggcagaatgattaggagttcaaggctagcttcagctataagtttgaggctagccttggctacataagattttgtctcataaacaaacatgagaatgaattcttcttgtagaattcccaggttttagagtcataagcagcactcatttgctcttctggcgtatgcttccaaaggccacattcctaactgtttggtgtaaatggtaacttaggccgtgggagagattcagggctttgacacatggcaaacagtaagattgattctataaaaccccaaaccatagtagaacttgcataacagggcaacaggtattttatttgatatttgtggggagagggaacatcattaccaaaatgaggcttgcatgtgcaaaggaactgaattccaaagaagtaaaataaaatttcttgttcaacttgggggtccctgatggaggagatggagaagggactgaaggagctgagggggtttgcagccccatatagggagcaacagtgtcaacaggccagaccctctggagctcctggggattggaccaccaaccaaaggacatacatggagtggcccatggtgctggccacatatgtggcagaagatagccttgttggacatcagtgggaggaaaggctctctggcctgaggatgttcaatgcccagggtagaggaatgccagggtgggaggatgggagcggatgggtggaagagcaccctcacagaggcatggggaggagtgatggaataatgggtttccaaaggggagacctggaaaggggaaaacatttgaaatgtaaataaagaaaatatccaagaaaaaaaggaaataactgcaggaaaaaaattcttgctcaagctatatgacttaacagggtcttttttagcactgactttagttagaataataaacaaaggtagcttcttaactttggactttctgttgttgttgttcttgtattgatacctatattgatgcttcctctactaattagtgcttttaactcttttattgctttaagacagtgtcttaacataacccatggtggccttaatctggtgtcttcctgcttcaatctcctgagttctgaaatcactaatataccatgtctggctataataaataaatgacattcatttaataacatcttatacagtaaagttgactctttgtatattagttacttttctcactgacaaaatacatatcaaaagcaacataaggaagaattattctggctcacagtttgaggaacagagagaacatgatggcagggaggcatggcaacaggagctttggcagctggtcacactgcacctccagtctgaatgcagacaggtgcttgctggtgctcagcggactttctcttttcttgtcagtccaggacacagcccataaggttgattgtgcatccatattaactttctagaacaccatcattagacaaggcctagggtgtattactactttctaaatcctgtcaagttgacaattaagattggccattacactgtgtacctacaagtgtaattttggaaggccatacaactgcagattgggaatgttttcagaagggatgtgggctgtatttccatggtataatgtttgcctgtaatgtgtgagtttttggagtttgatccctcaccaatgcaaaagtaaaagaaaaaagtattgtagatgagattgtgtctatactgaacacagacttttttcctttgtcattctttaataccatatcacaacattttacctaacaacttcagaactggtggtttgattaagaatggcccccataggctcctagagtggaatgcttggtcaccaaggaatgacattattaaaaggtatgaccttaaagaagtgtgttactgagggtggactttgaggtttcaaaagctcaagctctctctctttctctctctctctctctctctctctctctctctctctctctctctctctctcctgatttagacatgctaataaatggactaaacctctgaaactgtaagccagccccaattaaatggttttctttataagagttgccatggtccttgtgtctcatcacatcagtagggcaaatactttctcatcactgccttagtttttcaaggtaaaactaagaccaccagagaccattacacagaaactcttaaaactgaaaagaaattctttattgctggcctgcagctgcattgggaacttgcctacatcatgcagccccaagcctttctctttatgcaccaaaaacatatcctggttgtcatagttcagatagcaggaagcagaactacagaagccagaaagcaaggttagtacatttcgagacttcctggaactgtagactaggtctttgatgggttacatctatgttcctgttttggcacactttgaggcctacatgttatgatttacagtcagaacgttgcttctagcatagtgtctgtgtttctaaggtctgggggcctgttacattagctatatctcagaggttctgataaattgtgctttgattttcatttgaatctaggtatttttacatttcctccttgagttcttcattggtcattcataattgctcagacccattaccattcagagagaagaagacaaactactattagcagcaaactgcaacagactctacacagtaaatacacttgacaatggattgaagcccactgatgtcatctgttaattatcacaggacataaaatgacaaggttgcatataatgtgctttgaagttaaaatcatttaaggtccagcactggggaggcagaggcaggtggatttctgagttcgaggccagcctggtctgcaaagtgagttccaggacagccagggctatacagagaaaccctgtctccaaaaaccaaaaaaaaaaaaaaaaaaaaaaatcgtttaaggggttagtgtggatatagtaagtggatgaaataaatgaaggggaaaggcaggaaaagggagaaatacattaaaagaaaggaaaaagaagcaatagagaagtatagaagagaagagaaaagaacaagaaattagaaaaaaattaaatgaaaaataaagatttcccaataatgagaaaattcaaaagcgaaattaggtaaatgcaagaaggggactaaaaaagataagatcatctaaaatagcttaaagtgctatttaaaaatagtgtgggaacgaggaggatacatggcagaatgatataagagaaaagagaaatatattgttcaataaatttctgtgcgtgagggctggagggggtcagttaaactgggtttctgtctttcctagagcttatgctgttgctgtgtttcttaggtaaacttgcggtgtctagcactgctgtcttcattgataattttccttgtctgaacaccagcggcctctgctggccatacttaaattgcaccctgtggcaggttctctcccctggcagaagttctgttgggaatgtttctctcgggtacctcaaaagtgtgagaaaaagtcaaagcacatgggaaggacatgtctccgtactttaaagatctcctggttttcaatcactctgctagattgatatgtcagtggttctttagtacaccacagaacctccaacgttctcaggctcttttggaagtgttgatggctccagaggttgatgagctactgatctcaggctatcaaactccagaatcatttcaataaatgaactattgataagagactatcatccttatgtacttgcctgcttggatgagtccccccaattccctgtgcccttcagcttgccagcctttatctagctcactgttctctatagctgttttcctgggccttccttcatcctatgtctttggcaggcctgattgcagtttccagacctctggttccccactcagcttaacaataggttccatctcaagatggtatctggctctgccattggggtctaatgtaaagtgatgaagtggaacttcagtttatattgatttttccaccaaaggaatttgtttctcaccagaacctcccaacaggatttgaagcttatcaaggctttgtacttttcttgacttgcttggcttatcttttgcccttgcttctcccattccccgcctgggcacagatgctatgcttgcctactctttttggttaatcacatgtgggttttttttggcattttcagatattctttcactccctttgtggatttccaaaactctttcatgtctttttctgtttgggatagtcttgtcttctgacttattccatctggtcaaatacctcttgcaagttcagggtggtagtggggggggggttgtgtaaagtgtcaaaggtcattggtattttgatacagattacattacattgagtcactaaattactttgggaggcagaaacattttaaacagttatatggaatttttctactttgtagatgtgcttgtgtacataaatgtatgaatacataacatgttcatatgttcgtgcatttcgtatgcatgcattcctcagtagtattttatttatttgggtgcacatatatttaggaaagttactttctctgctgaattaatcccttatcataatacagtgatatttcttgtctctttttactcttgacctttgtttttttgtttttgtttttcttttggattccattttaatgatagaagtattccattcctttactttgcatctgtatgtgtccttagagttgacctggatttctgataagcatatagagtagtttttctatttaatcattctttgtgtgtttgggaattgtttatttgcctataatactgaggattgagcctgaagcctagtacatgctaggaaaacagtattataccccgagactgtttagctggggaccttaactcactcagattcaaagtaatcctggaaaggtatgctgttaccataatcattttgtaatgcattctctagttttgttgttgctcctattttttttctttctccctttcttgtagtctttcttgatggtttagtgctttacttactatttggctcgagtagtgtggcttgattctttattacttttggtttgtatattatagatttttttccttatggtttctgtgatgcatacaaacatcttttagttttaactatttttaaattgtagcacttcaacatgatcataaaggtacgaacaaaccaaaggaacaagaacagttgttttaatctagacaggggtagggccatgataatatatatagtttatgcaccatttttagcaatattagagcatctggatatgtctgtgtaaggactctcactagtcagctttgtactttttccatgttctcttatttgtcaatctcttgtggtttgaagaccttccctttaccattcaagatgtatctgatgggacaatatcctcctcttgcttttgtttgtctgggaatgatgttatctcctcaattacgtacaatattctttttaaaaaacatttatgtgtatgtgtgtgtatattttttttttcctttgagtgtgtaggggaaggcaaacgatgtgtgccgctgtgcacatgtggagtcagaagagtgcttggaagagttggttttctctttccatcttgggtattccaggaatggaattcaggttttatgctgggcaataggcagttgttttaatatttccctggccctggacacactgttcttgattaatggtgctttttcttcagtgatatgaaaatttcatgccacttttttcctgccttgtaagattcctgctaagactgctatcatgagaatagggatacttgcatgtgttattgatatattttcatgtacagtcttttaaatatttatatgtacacatgtgttttgctaacacatatgtcttacactacttgtgtgcctgtagaggccaaaagaggacatcagatgctcctggaacgaaattacagatggttttaagctgtcatgtgggtgctagtagctgaactcagttctctgtaagagcagccagctaaaccatctctccagcccttaaaatcttttttgtctttcattttgagagcttaactatagagatatcttggtatagacttgctttagttagatataactggtgttacctttaatcttttattatatatggatatttgtatcctaatacaaattctggggtttttttcactcaacgtgttttctacttttttttttttcttgccatttttaaattcttgggaccctgtaacttgagtacagagtacagggtactcaagtaccttctttaccatcacaaaggatccatagtttttaattttttccatgtacttgtcatgtatttttctccctggtgtgtgtacactttggtacttaagcacaatttaagcctaggtttgtcttatgtagattctatatatatcatttcttggtgtgtgtgtgtgtatatatatatatatacacatacatacataccaagaaagtatagtcttttatctgcaagcttctgcctgaggtcctgtaggccctgctgcctcatctttagctccacgtttctttctgatgtgtattatatgacagtgcaggattcaaccttgttcagaaaagaatctctttggatagatctttgatccttgggcttttatgtcataccagtcgccatcaatacttgtaagatgagtagtacttttaaacccacatactaccagcacaatacatagtgtcctatgaccaagggtcacagtgctatgagctgcctgttgctgaggtggactcctagcccaagatgactgtaaccagtcataagtattagttttctgattctgggactcttcagagacactgtctgaccagcctagcactaagttacagcatatagctttgtgcttactatgctgtcccatggtttgggtcttataccacactgtgctgccaaatgttgggatagtgttgatgaaggttcagtcctgatccaccaggctgattcttaagcctggtcaggccttacatgctgaagcttaacaatctcaggtgcactgaggtccataactgctggtaatgaaggatgtgtctgtcctgctagcgtatggacctatctggcactttggcagtttgagagagacagtgccttggctaccaagatgctaagctgtttcatacctgagtctctcacagctatagagaactgtactactttagtagatcagatgtgccgtggaaccagtccaaggctggaaacaatacaggctgaagctggagttttgatttacccatacacaaatatctccctgttgcaggagccagattcaaggctctttgtgtaaactttagcctgcatatagggcattcagtttctacaggtgtttggtctcactttgggccaggcatagaactctaggacaaagcctttggctagtttttatgctctgttccctagcaaatggaatcttattttccctctactgcctgaggttgaaagaggtagtcaacctcctgacctaagcattgttgtaatggatagtgggctgctgtcaggggtcatgtgactttgcctaacgctgggttttgccatggcaggcctggcactgagtatcaagtctaagatatgggtttaacttcttcactgtaccctaaacaagagcccattgaatatatctacaataaatactgtaggtttggattgtttgaagggtgcaagagagcttgtttgttttaggatgacagtgacgccatcactcaccttcacacagagaagtttagaaagtctggtcatgccttagttaacaatggggatatgttctgaaaaaaaaatcattgggcaattttgtgattgtatggacttacataaactcaacatagtacagctaaatcactttctgtggcatctgtttacacaagaatcacacagacacacgagtctgtattgccctatgacataaagttaagaaatgtagtaagcatgagtgaggcttgtgccagtataatatggcatatgctatttgcagtgaattttaatttatttggcagtgttacggatgaaacctggagccttatgcatgctagttgggcattttatcccctgagctatatccctagcctttgaactttttttctcttaatgtcagtacaggcatactctcaaagaattatgtgaaatagttgggaagatattttagtcagtaatgtgtttaccttgcttgcaagcgtgagaatctgagtttaatcctcaactcatgtgaaaaatcagatgtgatagtatttgtaggattcttgttgttaaccatgcaatcaaccagcattaagtgaattccaggccggtgagggagactatgtcgccagtaataggtaaacaaataagtggtagcaaaggaacaacactcagagttgtcctttggcctcctatgtacaaatgtgtgcatgcgtgagcatacagagcaccaaaataaggtatactgaaacaatctaaaccagtgatggagacacttaccataatcaatattaattattatatataactgtgttattgtgtttctatacaactatcaggacagaagctctgtttacacaagaatcacacagacacacgagtctgtattgccctatgacattgttacatctataaggtcactagacaatagggatttttcatgtccaccataatgaggccaccattgtgtatatggttgctaattgcagtgtgtgacttcacttttttgcttagctgaaatctcttattcccaatcctaacctggtctttgttctaatgctctgaatttccacagtactttgttggtacagttaaagaaacagatgctagtgatttggggtgttgtcatgtcccagatggttaattttctgtcttcctccctgcttctcctttcaggctccatcagtagctttcaagtacactctgtaagtaattagcatcccctttctagcatttgaatttgtgactgcaaacaaaattctataagactttcagtttgcttccattggtgtttttccattttccttctttctttcttttttttttttttttaaaggagctaagtgaggtttgctaggatagattttgtttcttttgcatacaccaagaagcctaataggtcatgtatttcctcaatcttgtctcatagttgttaactggtacaaaagccccaagaaactccttgctacctgtgtttaaaaaaaaatacaagtaaaaaaaataactacccatgtgttctgggagttgtctttttatgaaggcttggtgttttgtatctatttaggttgatgtattagaagaactggcatttagtaagcatcctagttcttttgcttttatccccaagttactagacaaataatgtagagtgacatggtgcctgcctgtaaacctaagcatcagtgtgtgaagacttgcctgtagggctttttaaactagaccggcaacatggagacataatccctaagattctgggcctgagaatgcatttttttcccctaagctcccaagtgttgctaatttaggatttcttaggactacatgcaccagaactcaaactcaattctgccgccccctgtgtctaggagtgggcttttgggatagtcttattatggtaccttggctgacttgacatttatgatgtaggataggctggttttgaattcaaggggttaattccaggaccatagtggatactacatctgtagattcttaagtcccttatataaaagtgctttattgcatgtaacctctatacaccctctcatatacttcgtagtttctctaggtgactggtaactaaaaactatgtaagtagttgctattctatattggagtactacgtaaaagcagctctatttctccctggtgatgaagatcagtttattctttcaaatcagcagctgccctcacctgttgcttcttaggtcctagagtttaaagttactctgctagcagcttgtacttgtagttcagtaagagtcttgtactgctcttttcctcaaaaactgtatacaatcttaagaatcaagatctctaaacctgcagagtcacactcagaaattcagatgtatttcttatggagtaaacttacttctcttttaatctagttatttacctgaaaaaaatatttttccttttttgttcatcttttgttttcccattttgagacaatatttcttatgacgcaatttacctcaagctccctatgtagctaaggaggaccttgaacttctgattctccaggttctacctcttgagtgctattattatagtgatgtgctaccatatactgttctctcttttgtaatttaattttacatatttgcacgtggtgactgtgtcttcaagactaaagggggacgttttgcaggtttctagaagtacttgcagatctgaagttagttaaccttgttcctgtcccattctactgatcggaataaattatagaactaaccgagatcagtgggaagaacaaatagactctgtatggaaggtggtatattcctattgcaggaaatcatgagataataatagaaaagagaaaatatcatggtagctgtattagaagtttaatttgctttatctcctctcttccaaatctttgtagacccttcttacttgaaatggttttcttttttaattttgtaaccccttttattcacttaaaattttttcacttttcattttaataaggactaatcggagatactatgtgtttaactttcctcagtagaaaattgtgatctttggattcagtgcaatgtttctttttattagtatccccatattgccttactaacttactagaatgcaagttgccttggtttctttttcctctgttactaatagatacttggcaagtcacatatcagagtatgacagtagttagcagtggtctctgctgatatgaaaatgtttcttacaagagaataagggatatatattatatagagaatttatgtttgtctgctttttattatcatcaccacataccagtaatcttaaataacatgagtagcagaacacacctttctgttggggatgtgaacttctgtgaagttctcatttgcatatgccaaagctcatagttaagattatattttatcagagggctaaagaaagattgcttgctgctttcagagttaatagtagtgccgtccattggatatatttttgcttataggaaattataatacggagtctcttgagagtcctttagaaaatcatattttaaggggactttaaaaaaccacggggctggagagagatggctcaatggcttaagtctgtttactgctcttacagaggacctgtgttctcagaacccactgtgagcagcttataaccacttgtaactccagcgctggagacatcacatgaacatactccttaccaccaccttataagcacataattaaaaataaaataaatctctaaaataaaggaaaaaccagatctttggaggtgttagatgggatgcctaaagcctacaaacattgagactaatctggaggaaactaaaaacaaactgagctgtatttgcctgtgtgagtgtttgaaatatttttatatttagtgtccacaaatatgtgggtactaaagaaaaggtcatagctgtttagaaatacttaggtaagaaaggtaagaagtaatgagttgttggctttgtattgtttgagtaggtgctatgctcatgaagaagaggaattcctagagggagctcctccttacttttgtaaaacttggaattcagaggtttctgcggcccttgtgtagttaacagagctctgtcttaaatggttggggtgcttaaaaagatttgagtgaggaggatgggtcatattttggagtgtatatttgaaaagtaatctaaacacctttgtgtttcacaggacttaaatattatttattcttatctgcatgggatggaaatactatcaaacctcagggagcatcagcttaggtgagtgtgattggtttatcagtctgcgctatatgttacgcatctgttcaccgggtacttgttaaacctttacagtcatcctgtcttaggcatttgaagtacttagactagatctctagtgtcctcaagtttgaaagcacagtaaggactatatacagccagggtggagttggcccatgggaaagcagaggcaggtagatttctctgagttcaaggccagccagggctacacagaaaaacctggtctcaaaagaacaaaaaggagagagagagagagagagagagagagagagagagactgggggtgggggtggggggggaaacaccagcaaattgtatgctaggcagaaataagtactgtgagtatgatacagcatggtgatgtgaagtcacctattagcttcttgaatttagatcattactgaagacctcttttaggaaatgggttttgaaggaaggaaggcctctgtaacagggcctagaaaacgggccaaagaagactttggtttctggtacagagtgaaaaaaatgatatagaatacagtagtagtctcagggagccagataacttaggactttttgtaaggctagacataggagtttcttattccagcttttcttagtgtgatagttaagtctccatcatatatgctgcagttttgtcttcaataaaatggggtgataactttgtctttttaacgtgtttttaatttaaatgagactaaagcaaagaactatgttctcaatttgtgccagatagtggagttgccctggttttctttctgtttctgtgataaacaacataacaagaggcagcttgggaaggaaagggtttatttggctgacaagttcccattacagttcataattgagggaagccacagctgaggcgggaactgaagcagaagtcatggaggaacactgctcatgtgcttgtcccccatggcttgctcaagttgcttttttatgcaacccaggaccacctacatacagatcgtgctgaccacagtgatctgcacctttccacatcaattattaaatcaagaaaatgcttcatagacttgctcacagtccaatctgatagaggcaaatcctcagattccttcttccagattatttctaggtttatatcaagttgacatatactaaccagcacagaactcaaagctcttctatttcctttttgaagactctcttattagttgtgccagatgcttaagctgggtacaatatgttaacctggcatgagtttgtgcagccaagatccatacactttatgaacctctgcttcctctttaagtcagaccttgcctggcagtggtggtgcacacctttgatcccagcacttaggaggcagagtcaggcggatctgagttgagggccagcctggtctacaaagtgagttccagaacacagagaagccctgacttgataaagtcagacctgtgtatctgagatcatatggttatattgtagctactttagagtgctatgaagcattaattattgtgattttgtatattttcattcaacctgctttcttttcatgaccaattagctcactgttttttctcagtgttcaaggttctgatgatgaaccaagttgttaaaatataatttattttctgttacattctgtgttctgtataaagtaacttgggtgtttgtgtttgtgaatatatcaggaaaaatgaaaactaaaaattagagcaatcatcaaaatctatttattttatttttaaagattcttttaaaatgcaacaaatttatgaaccttgcagatttttttttgggtgggtatatatgtactgttgccagtaactgttcttcacaagatgggggaatgagccattcaaatgtatattttatcaagataaaattatttggtgtgagttgacaagttttgttttgtttttttgttttttcgagacagggtttctctgtatagctctggctgtcctggagctcactttgtagaccaggctggcctcgaactcagaaatccgcctgcctctgcacacacacacaccccccacccccccagtgctgggattaaaggtgtgcgccaccacgccctgcaacaagttttttaatgtgtataagaaccttaattccagggctggagagatggctccagggttaagagcactgactgctcttccaattcccagcaaccatatggtggctcacaaccatctgtaatgggttcaccctcttctggtgtgtctgaagagagcaatggtgtacccatataaataaataaataaataaataaataaataaataaataaataaatctttcaaagaaaaaggaattttaattccataacatcattatggttttgattggttttgtagtttcgttttactttgcttgatttttgtatacaaaagctcactttattgctctgatgagacttgagtttattgtcatatgactgcctcagcctcaatccacctgcatatggcatatgcctcagtcacaggcataggccactatgactggtttgcattacttttaaaaagcgnnnnnnnnnnnnnnnnnnnnaacgacacagcggaccatacgactggttgcattactttttaaaaagcgaagaagaggcaaaatactttaaaccaaaatatctatagctcttataaaaaatgttattgcattacaatatatttccaagcttagtaaaaatttagttttctgtctgatcatttttctattgatataactgatagttttaaaacaaaatgtaagataaaagccttgtctttttaccctttttattaggttaatgtctacaagagcacgctatgagagatacagtggcaatcaaatgcttttttggtaagtatttttatgattagtgacttatgtttaaatctgtacttttcacattaaagttgatttggtaatcataaactgaagtataatacatataaaacataggaaacagtttcgtgcattcaatgttaaaaatatatgcaactatgactactgttgctaaagacactggctttctttcctagtaagctccactcagcactgttttggaatggtaattacaattgtgactttattgttatcaattaatttacctctttgtcaatttcttactgatagatcttttgatcaggttgttaaaaagcaaaagaaaggcaaaatactttaaatcaaaatattatctattgcttttaaaagaatgttattagatatatttccaaagttggtaaaaacacttagttttacgtctgatttagcagatgtcagtccaggattttttaatgttccactttggggtttaggatttgggatggtttattgaacacacacctaaagactgatcgaccagggcaatagctcaggctcaagagctgaaagctgtgtgctggacatttctcagagccagcttataaaggttaaaactgcaaaaaccaccatgagctcatagacaggtgctggaaatgctatccagtggttggccctaactcaagccatgttttacataatagttcatattcacctttaatttgatgggtcctaacatgaagcctatagttgtagaatgccttaagagtaacaaacctcttaacatgcagaacataagcagggtatgtggtcagcatgaccttgaactgagtcaagttatttttcttcatcagtaactggcaggcacgttacagctgtaatatgaaatagctggcgggcatggaacaaatagctagcggctatggtagagagacaggcctcaacagttctctttcactgatatagttagagtatatcttggttttctctactgtatgttggggttacttccagatttttactgttgtgaagtgaaaaataagctccctgtgggaatttagctcactcctttgtacccttacttattattaattccacttacacatctttgtagaaataaaattaccagaatttcgcatattatggagtgttaaatggagttactaaaatttttcaagtgtcaaccagcttcctgctattgttgtaccagtttcagtgactttcagctgtgtaataactccttgtacccatcttttttgcatttttgtatttccaagaccaaggttagggtagatcagtctaccttggcctccctgtggatggaaccaaaggcatgagccacctcgcctggccttgttgacccatctttaacacctttgcagcctattttatgttcttgcttcagttttaggcaacatcacttcattatctcaccatgattttattctacagtgttctgttcactaatgatgattaatggttctcatgttttcaacctttttggctagcttctaatgaaatcttaagagttcctaatcatttttctgttgtaatgccttatttgggaaattaattcatcatggattatcaaatccttggtagatatgcttgctgcaaatactttcctcgttatgatttttgtctttcctacatctttgcaaggatgtatacttggaagacaaaggggtgattggatctcctggacctggacttatagatggttatgaactacccaacatagatcctcccaagatcaatatgcactcttaaaccccagaaccatttccctagccatgatcaatgctttttatatctgttctttaaaaaattataagccgggcatggttgtgaatgcctttaatcccagcactctggcggcagaaggcaggcggatttctgaagctagcctggtctacaaaaaacaagtccaggaagatagccagggctacacagagaaaccttgtctcaaagaacaaacaatcaaacaaatttataacgacccatctctgctttaagattgtaaaaattgtattgtttttagttaaaaccttcagtattttgcttcccaaaaagtgtgttaactccatgatgtaaaagattttagttattgttataaattgtagttaaactcttatttcccttgatttaattctatttttaaaataaattcattctatatgatgtagctatattcattataacaaagttataaaataaaaggtacaaaatggttgacattatatagatttgtattcagtctactatgtgtctgactgacctttagtgaaggaaatctgacttgatatagagaaaaggttaaaaatgaacatcttaaaataacttagcagcatcttaaaataatttgtatttttctttggtataaaatcaactgtttataacttttttacaacacaaggattaattacaacacaaggatctgagactttgtcagtgaattttgttgttgttgttgttgttgttttgcttttgttgttgttttgcttttgaaacagggtttgtcctgtagccctggctatcctggaactctatgtagtaccaggctgtcctcacaaaaatccacctgcctccacggcctgagtgctaggattgcatatagttaaagtgcttttaattagttatttttctacatgtgatttttgtggcattttgtatgctatttggaaaatattaataataatgaattttataatttttccattttgacaccttttatacattatctttaaaatgtcattaactaatgaaaccactactctcttccagaaaatttaggaacattccaatcttgttacatctaaaattgaaattttttaaagctttggttttatgattgacagttttataattaggtttttgtgatgcctaaacgacccagtagtttttaatactgtttttgcttttctgtatatattggagaattaacccatcagtttccacattcataaaaacctgttggacaatttggcccttgtgttgggagagcattaaatctaaatcagtgaagaaagaattgacatcatagaaataccatctttcagcatgcacatacgtatattcttccacttatttgctggtctttaattctttacagcagtgttatgttttgctttggttttacaggaaagactttgctgcatatatacttctaaattgacagggtttgttattttgaaatgtgggtagtctttttctctgattttttttttagatattgatttatcatgctctacacagttatgttaaagagtcagttatttttattgttttgtgagtgacattattttctcatgaatatttttccctcttgcttctcaacagtgtctagtgtccttaaatgtgatcccccctttagatttctttgttaaggatttataaaactttttcattacatttaaaaaacatccttagtcactatgtttttatgattgacttcttaaactgatttttctttcctactttcattcatttttgtctctcatctttataccattttcctcccttattttctctattatgttattttctactgactttcttgtttatgaattcttttctcctctttctagtcctaaataaaacttcagtgtttgacttcctggaatgtgtgtgtgttttaatttttcagttctaggttttaatacatttttcataaatttcagtgcttaagtaagttctatgttgtcttttttggttggttagctttgagcttactaaatataatggatggggttggtgtttgttgtttcctatttttttaattattattttgttgttgttctcatcagtcttagtaattttctactgaatgccagatgctgtgtgaaaagtagaaaccctgcttagctttctctgggtgcttagaagtgtgctttgtttgttcttgcattttgataggcagaatgaagacatcttgatgcgacgaatgctgcatcatgtggtcattagtggaagttttcttttggttgcttctattttttaggggttaaggaagctgcagatcactcaaaataaaatgaataaggagaattaagggaattctggaaaaggaaggaagagagggagagaaggaaatgagtaagatcattatggaatagacaggtgataagagtctaggtaacaaacagttgcaaagaggtggtgacattgattggagtcttgaactctagattactgaaggattaacttgtgacgaagcaaatattccagtaaatgactgtggaaatgcatttagagcaaaatagaagataaaatttctaacaatctggccatggtgggctcacatggagaatctcagcagtgggagtctgaggatagaagattgccatgaatttgagagcagtctgatctacatagaacgttctaggttagacctgttatgttctgggttttttgttttttgtttttttgtttttgttttttttggtttttcgagacagggtttctctgtgtagccctgtctgtcctggaactcactttgtagaccaggctggcctcaaactcagaaatccgcctgcctctgcctcccaagtgctgggattaaaggcgtgtgccaccacgtctggctcctgttgtgttttattaaaaagaaaaagccaaggatgtatttgatagaagcacggtagggtgagatggaagggggtgtctctgtggctcatgctgaggcagcccttccccctgaagtaccagctatacaatgggtttagtatagaatagtttatttagggcatgagaaagggagtagagacagacagaaagacagacagacagacaggaggagagcctggccaggaacatgtggagagggggcagaggaggagtggggaagcaggaagtgggagaatggggtcaggatgagaaggggcagagagtaagagaaagtggagggggcaaacaagccccttttatagtaagccaggcatacctgactgttgccaggtaactgggacagaaaggatttgtatcagccaagaattctgcaagaaatgggaggattaacttttagtgtctggaactgattacatcacaggacagtgactgatatgatcagatgatctaaaatttacagctgggaatctttaatgaaaagaatagtttgttattgatgtgaggtataaggagaagacagccatctttaggcccagaggcaggagaaatatatgagagaatctaccattttaatatgtttgtaaagtaggcagaatccaaggaaatccccagagaacacactgagaataaaagatatctttcagatgtctgactagagttcagaagactcgagtgtttttatccttatgcttagttgttaaggttcaagagagctaatgagtatctgcagtattttcaaattttactgacaattataacattttgaaaattcctagaaaatgagtggtaaatatggagatctaaaaatactagagcatttggtaaaagttgttaattgtataaaaaaagagtatctttactttctctttctctcacacatatatactctcttcgaccctcatacactctggtatgctagaaatggaactttgggccacaaaacagctctgttactgagctaaggccccagcccctttagtggtttgaggttggaatattaatcaagctctactggacttgaagaacttaaaaacatgagaattttaaaaattttaaagaaaattcttataaattggcccaacttaaaggttgttgaaaactgtgactaatcattgtgtaatgacactgaaaatcaaaatcagctcttctttaaaatatagcattataatacaaagggcaaaaggaaattctaccctgaagctccacaattttatctttcctacctctatataacacaatttcaggaattcactgttttattgttcatctattttctttttctttaatattttttattattatgcattttcctcaattatatttagaatgctattccaaaagtcccccataccctcccccccccaactcccctacccatccattctcattttttggccctggcattcccctgtactggggcatataaagtttgagtgtccaatgggcctctctttccagtgatggccaactaggccatctttctaattgtcctcttgtctgttttttaagttctcatgtttcctgtttactggtgatttgaagggttttttttcccccttctgcttgtgtgttgagaattatcttctgccccttgtgaacatgctctatgtgtaaaacattaggtaaggaaacaagaagataccccaatattgttacttagtttttaattatttgcagcattaccagaatgtagtctatgctttgcattcatattgaatccgcacatatgtagacatttgtatttgcttacttttttccttatatatttaaacagttcagaaactattgccagatgttggtatatcctgctttctggatctgtacttgtaaaagattctatggtccttcctccttgcaggtaagtttccagtgatactgtgtatttttttgttttgtgattggatcttaactatttatctttgaattgtgctcctgcctcagtctcagtgctaggatttttgcagtctgcctgctccatctagctagataaaattaatattgtaactctttcgttctttacttcagagctaatgtacattttttttttcctcagtgacaatatatttttgaaatatattttcggttgatgcaattgcacattttggcaggagtctaatacttaaatttctgatggtgtaatttttcctttctttgtgtttgaaccttactcagttatgtgacttatttttagttttctgtaagacaaagatgataacccttggtaaatgtcatgaggcattagcaagtttggttactcaaagctttcaaaagtccgttagaactcagagcaaggttactgaagtttgtatttctagctagcaattcttaggcagattacttaacctctctgagtttactcagaagtaggtataataaataatagtagaagctgtttgatagaccaggtctgcgaaatacataagttagcataaataaatctctcttagacatctcctggctatttacagtagttgttagcaatatttataattattttttgtattttaatatacctttaaaatatattctttcacagtgtatttgtatttttatctactttcccactaaaccccttctcaacaagtcttttctctctctgtgtgtgtgtgtgtgtgtgtgtgtgtgtgtgtgtgtgtgttttacattcatgctgtgccatggtgcacatgtcaggaaatcaggacaacttgaatctgttctctcctatcatgtgagttctggagatggaactgaggtcctcagcctggcagcatgcacctttactcactgaaccatttcattgtccaaagaagacttaaagcgagacatgagagtacagctaagttagttgagtaatgttaaatttattaaactaaataccaaggcacagggtatcttgatttatatgccattttaaaagtcatatcttttttttttttttttttttttttttttttgagacagggtttctctgtatagccctggctgtcctggaactcactttgtagaccaggctggcctcgaacttagaaatccgcctgcctctgcctccccagtgctgggattaaaggcgtgcgccaccacgcccggctaaaagtcatatcttgaattctaaaactttaaattgttggccacgggttaaatgaaatctgtgcttcttcatgagtagaattaagcgtgttaaccttttacaaagattttgttgttgttcttggttatttacgcctttttgctattcctttctctatgtttgtgaaacttaaaataatgaaatttcattgggtctgcctgtggttgattttaggattagtattttcttttgaatattttctcattctcctgtgttttttaaatagttacaaatttgttgtaaaaactctttgtagccaataagtgaccatttgtttctaatctagtcaatgaagttttagtttttagaataactcgtaggaatatgagttttgaacaaagttaaagaaagttatgttggacattaacttagctatccagaacacagcaaacatgataatactcgtttaattaaactttatactaaagaatatgggtaataggtctttatttttgtgtgtgtgaaagttaagaaacactcattaggatgaatgagttaatggaaagagaagttcataaaatgatagttgtcataaaataatcatcacattatttttggcttgtgtgaatgttgtttctaaccattatgatacaagaagaatatgaaccctccatagtctaagactagggatgatagtagtattccagcccatagaaatacaatgaggttctctactggggcagcttaacctaaagatattaactattgaatagcttcattactattaaggataaaaaaaataactgaccgcaccccaactgagagtgaggacccaagtcaaaaacaaaccagaaaggggaactgttttttttttttccccttatgactgaaatataggctttattagaaaatattattcgcagtctagtacaaaagaactttagagtacctcttgccaaaaattagttcatactgtctgggaactgagagtatgagctgatgaacagtaatggtaagtaggaaaagcacccgagtctcccctttcttccagatgatgactggcccacagctggtaaaagggtcaggatctttgccctgccctactcagccccactctaccctgccaactgtagagcaaagacctttcttgtgtagcctctgctgacaaaactgcctctggctcttgggaaagtagaacactgacagaatctgcaacttttatcacaatgtaggactgttgaagggttaatttcaatcagagagtcagtccatttggagttgaggaagtaggtgaatgcaaaattaactggcatggcattttagctaaatacttttggatttccattcaacaacaaaacaactctttttgactaataaaatataactatcattcaagaaagtacagttctaaactctgacccaaatgaagagggaacagtcctattaatcatttctaactatatcaattatatattccaccataatgtctctgtatattttattggctaaagtttaccttataaatgttcacttccaataccctgtatttaaagagaatgggggagagagtaacgtgtacaaactatgaaaatctataggtgtagttcttatccttcagaattcttgccttcagcaaaaactaggctgctctgggttctttatctgatagtgggagctgaactttattgtataatgttcttgattgtcttgccttttttgttgttttagttgttgctgttctagacataagagttcttctagctacagttgtgtgccacaaacccaatttcttctttgtaattggggttagtcacttgtgacaatagaataacatctgtttgctgcctattggtttagtggctagggagaaaaaagattgtgttctcctggtaaaagcattaagactaaccaagcaaagttcagagttggtaggaagcaagcaaaaatactataaataagttgttagattaaaacactgagaatactgggaaaagcaaagcattgttatagctgttttgccaaaaaaaaaaaaaaaaatgagtttcttgattgaaggtaatgcaatctgcagtgccagataagaaaatatactctgtaagctcatgatggttagcagtactagcataatctagaatgtgtttggtgaggacaaataacctgactcctccgtaattgacgcgatcgattataaattacgtggctcctatagttgtcttgtccccttgagaaatgctaacatattaggaactcagtattgttcctacttctgaaaaaataggtactcagatgtaatttgatccccatctcatcttctctttctttgctgccatactcagtatgtttacagtctcactgctcaagcactgtacaagcttgggaaagagactgatggatgtctactcttgccttcttaattattaagagccttctctggagcttgacagatggttcagtaagtaaagtgctttcagccaagcatgagggcctgagtttagatacctagcaaacatatagctatctagatgcatgctcatagtcccagcgtggtggggtggtagtggtatggaatagagaagatgaagagagacaggatcatatgtcttggtggccagccagtctagccagaacactgagctctgggttccctgagaaacactgttctagaaaataagttgtaaaatgatggagcaagacatctactgtccacctctagcctgcatgcacataaacatctgtacatacatactatagaataaaataacagccttctccatagcatatgcccttttagaatctacatggacacaggtatctttaaattctgtgcttgttctgaaaggtgctcatttacatacctcttcccagactaccttgttaccaggcttctaattctgttctttgaaatccctgaccattcaaaattagtaactgtctctttagatcagtaattgtggccatctgtttatgagaagaacagtcaaagaaaaaaatcaatagttatatataaagaactataatgcattatatgtgttacctcaggttctgtttcctagaaattaattcattttcagcttctgtagaatcagcattccttgggagcatgggtaagagctacaagaaataaatggcaagagtaacatagtggctttcttcatcttcgtatctattttaatagatcgtgtaatttaatagggttagttcaggaactggtggatggctcagcagttaatactggctgcctttccataggacacaggtttgattattagtacccacatggcagctcacaaccatctgtaactctagttccaggacacccaacacccttttctgacctccacaggcaccaggcatatgcacatggtgcacagacatatatgcagggaaaacatatacacattaagagtaaatattaaataagagttaatttaagattcaaaatctaggtatgatgggaaagctcataactatattggcctatatagggatgaactaggtcagttgaagtggaagttggaagttcattgttgtatgattcttagagcttctactatttactattaattgagtaaaagcacagacttaaagaataatgatgttgagtggcccttgagtctgagggagttcaatgccccaatgcagggggatgccggagctgaaagtggggagtgagtgggtgggggaacaccatcatagagacagggggaggagggtgggatggggggcttccggaggggagacctggaaagcagataacatttgaaatgtcgatgttcatggcccatattatcaccaaaggccatgaagatgttccagggctggactgccacttgcttgggaccatggtgatattcaagcgctacagagtggatcctgcaccttgcctgggtagcacaatagggctggcactggtggcatgggtgtgagtgagccagccctaaggacatgagaactgccccacacttgccgactgtggcattgggtatgttggcggggtagggacagtgctggactttgagttgaccagcatctatgaactgctggagcgtatgaaggggccagaggaggagagactggtatatcttcttgagttttagggcaccctgatctacgtatgtaggaagtccagaacagttggatatacatagtaacaagcaggggtgggggtgaggatatacagaaactactagcaaaataatagtacactgaatctagggatgtatttacaatactgtgttatcagcattagaattttccaaatacagggttggttgtgcatccaaaatcagttaataaaacatactataataaaatgataaaactgccggatgatttaagcatagaaaactattgattgaatacaaaacaaagtgaaatttgtagacatacaggcagcaacttcctaaccctttactttgtggtctttttactttttaataccattgtgtcatgcagtttgataacttgttttccaccttcgttttagtatagtagattcttgaaatttctgtgtaaatctttggattgttatgtcagactttaaaatcaactttctgggatttttaagttattattgtaactgcactgaatctgtacaatttggagctgttgttttattaattggatatcagattttgcacatcttatgtaagtgggttcttgtttttgttatatttcttaagatagtaataagaattgttttactctatagtctcactatctataacagatgtgattattttgagccttttaaatttgtgagatcaaacctagcacttcagaactgtattatcattgttaaaaagatgcatttctgtagacagtctttaatgtccttgtgttatgtgcttgttcagttggctcttttttctcacatacccactagatatgctatgaatcacagtacagtatggacttgaggacctttccagagatctccaaagtgtataatgtgtgtgtgtgtgtgtgtgtgtgtgtgtgtgtgtgtgtcctctctacttcccttcttttatccttcttctcttgcatttctatcttctctctggtactccagctttacaaatttgaaaattttgaagcagtttctctcttaaaattgagttgatatctttgagttcaataactgcttcttgggtagtgttgtcaagattacatgtagcaaggatagtaagctaagcatttttcaaggtcagctttgctgctgctttctctcttggaaaaatatgctactcctgagctgcttaccttccattatcttggaatttgtcacatatatacttttatgattttctttcatttttgtattttcatttacaagagtgtatgcagctcctgttctgtgttgcatgaaactcattttggaaacatacataaaacgctccagtatagaaataaagtgatctttttttacgttcaaaaggtaatttcattagatttgggtgggaggtggtttactgttccactctggctggccttgaattagatccacctgcctctgcccatcttgattgctggagttaaaggtgtgtgccacaatgccctactattcaattttattgaattttgtttaggatttttattggaaattattatttgtttgtttgtttgttttaatgtatttatttttatttatatgagttcactatagctgtcttcagacacataagaagagtgcattggatcccattacagatggttatgagccaccatgtggttgctgggaatcgaactcaggacctctgggaaatcaatcagtgctcttggccactgagccgtctctccatatcttacatgttataaaattgtaattctgagtctccttgtgaaagtatatgctacttgttgctttatttagaccctggttccagttcattggtaaagttttgtaatttgccttataaatgacttagaatttattctgagtagcctttttttgacaatagtatccttccccttcctgtgtatttaatgtagaggcagtattttactttgatatataatttttatttcatacatatgagcatttttgtctacatgtgtgtatacatatatattggtgccagtggaaaccacaagaggatgtcaaatcccctagtcctggagttacggaaggttgtgacccaccatgtgggtactgatactcaaacccaagttttctgcaagggcaaaaagtgcttttagccactgacactacacacacgtggttcacttacacacacacacacacacaagaaaaacaataataagtaaatataaataactttttaaaagccaaattttctaaagttctaacaactgtctaggcctcttatggaacaataaaaaaattattcactaaatacgaacctaaatgaaagatcatctcagattattaaaggacacagtattataaacaaatcatttcttacttgggtctatttcgtatgtgcctttattttctctagctatttccctgaaaccattcaaaatttaaaagataaggctcagagtaatcaagtctgagttaagctagtagactatacagtagatcagttcctattgctgataggaactgtaagcactataacaactctcagacccatcacatatctctgtgtcaccgtgctagtgtcttagatctcaaatttaaatgtacgctacagggtttgtctttgtgtctcatgtgtttgacaactttttttaaaattgacctttctaaagctcagtttttcttttatttcttcttagttttgatttgcgtagaaatctttttctcagatgaagcatatggaatacttagcatagactttttaaggcttatttttttaattttttattttttccagaaataactaatctggcgattccattttttaaaaacatcattttattgtctatctgcatttcttcattactaaaatgttttttgtttctctatgttatttagtataataatgtacttttataaaacataactatactatcacatcttgaatatttttctttcaatttagtcttgtttaagtgtttagaatttaagattaggaaaatatcttacataaacaattatggggactaagtaaagaaattttggaaaaagttgtacacagaattgaaatgagatttgtcatatatgagcaattaagaagaactcatttgtttttgttagaaaaatctcagtaagatgatcagaatttctcagttaatgtcttggagcttttatttttcccatattgacatacgttataacttctgctaaagaaattgtttttctgtttttatagttttggtaagcagtttggaggaaaaagaggatgtgattgtcttgtgttagaaccttcagaaatgattgtggtaagatgctgaattgcttttttgtatgcttcagtttcaactctaaatgtggtaggctttcaatactcaagaaagtttcttttccatggcctatcctatgatgatatttaaataacatcagaaccatatagcacctttatatatttttatctctgacacttctgttgtggttgaaatgatgtctaaaatgataatagaggtaacatgtcccaaatttggtaactttctttacctgttccaccagaaaattaaaaagtaggctcgggggaatgcggagaggaaatatgtgtatctctgtctgtgtgtcaacgaagtggggaggcctctttaaagggacataatttttttccagtgttttttcctttgccagtaatggagtcagtaaacttcagatgagctgaggggaagagctagagaaaataaaggcacataggaaatcggcccaagtaaaaatagtttgtttccaatacttgtactctttaataatttgagataatatttcatttagacttgtgtttaatgaatatatttttattttccataagagcctagatagttgttagaactctagaaaatttggcttttaaaaagagttatatttatatgtatgtatattatgtatgattgtttttcctgcatgtgtgtaagtgaactacatgtgtgcagtgtccacagaggtctaaagagggtattggctgccctagaactgtaggtggtcaaactgcagtggataacaatgtgctttaatacttagtgcacatgcaagaggtatatagcatgtttatgtatcaggaaaagtcaggaagtcattttaggctacagtcatcttacatttgctgtttgaaacgtggagctgttatctcttttttgtaaagggagtttgtttgtgatgttgttgttgttttagaaaatgtttaaaaaccaagctaagctctggctactggttgtgcttaagttccttgagatcccctcagtgaaatgcatgccagcatgtttaaagcccagagtttattctggcattttaccatgtcctttttatttactaagacttagaaatcgttagcttacattttcatgtacctattaatttatcaccaggttgtttaagtatttgactggtgggagggttcatcaggtaaaggtccttgccaccgagtctgacagcctgctctccagaaattgttccctgacctccaccattggtgtggagtgtgtgggtggggagtaaataatgtaagaagatgttaataaaaagtgtttaaggattgttaatttttggctgggtggtggtggcggcccacttaatcccagcactcaggaggcagaggcaggcggatttctgagttcgaggccagcctgatctacaaagtgagttccaggacagccagggctatacagagaaaccctgtctcgaaaaacaacaacagcaacaaaaaacaaaaacaacaacaacaaaaaaagaattgttaatttttaaacgagtaaacttaatgtgcaactagttacaagccagacgtcatgattctcgctttaattcaagcacttggccaggaggtggcaggatgaacatgatttcaaaaccatatgatgagtcaggcggcataggttacttaagactttgtctcaaagagaaaaaaagaagaggaagagagaaaaagaagaaagaggactagggtgaggagacatatattactagccagaatactaactaacatacatacatacatacatacatacatacatacatacatacatacatgcatacagaaaattactgcctagaattttaatgtgcacatttaatgtattaaatatgcctttaaaaaatatttaacaatgaatttccctttatacctctttatcatctttttcccctttaagaaacaaagtattttcattagctggcaacaatgtaaaggaaacatttaagagaatttaaaataacccaggacccagatcaaaaacactcccattggcgaaacctagggacatttgggaattcaaataaaaatttatagtggtgatggtgccttcatatatcatacaagtagttaaaatcttgatgatctgaagaaatgaagaaggatgatgagctagcactccttgatggtagaatgccaactaacaaatggtaaggaaacacttggcttacaattggtaaaactagggaggctaatgttcagttaggcaacagaatacttaggacatcacagaggatgttcctagcaattatttataaaggggacattactaaatttctgatgttaaaatatggcagattttcatcagaatagtaattactgctactgctattttatatatacacacaaactaatgggatattactcctgttgtgacaacactgagaagaagaaaggtcatgactagaatgtattcttgttcagcattcatacttaaacaaaagtcacaaattatcagacaaattagagaatgttctacaaattgatgagatctcaatgacaggagatagaacagtcatggaaccattctaaaagacataaatatagcatctaatgaacataatggttgtttttcttttgactactggacagtggagaattgtaaatcctgttagcaacatggcatacaggtaagatactattgaaaccttgattttgataactgttttgctaatatgagaaagttcaagggataagaaaatgcatgttgataaatttcatgagaaatagacaatgtccctccagttactttttagaactgtttttgctgattcatctgtgtttataatgctttattaattatagtagaaaataatccaatatttcagaatgtattaaaatgttgagaattcattgaaatatttgatctctagtaacttcaaggatgattggaactacctacaaccagacacctttttcttcattggatgtgttagcttagttggtatctttcaaagcaaagatcactttgttgccatggttgtaaatgcctgtagttccagaacctgagacaggtgaaatgctgaactttcaaggacaatgtgggtcatagtgagaccctctctcataagcagaaaaaaaaacaatttatcttgtttttaagaggttgtgaatctgttatctagaatgcatttcattacagtcacaaagatttcttttccctttaggaatttttaggttgagactatactttaaaaggttctgtacatgatttttatttcattttatttttttatttttgatttttaaatatagtttcttccaggtagaaagataaggacagctacttaacagcctatgacccaatacattcttggagttagaccagtttttcttaagagagaacaactatatgaaaggcacccatggtgtaacttgaagacttcatcaaaaattaaaaataatgataaagggttttattagcaggcagtcattggcattggaaagcatctaataaaattggaacttttgtctttgctgggagtgtgaggtgctgccaccagttagaaaaatggttaggtaggtcaacatattacccattcatttcacccctacatatataacatctggtaaacggatgtacacattatccataatttcccagaaatagaaatagcataaatatctgcaacctgaataaaccttattcagtgtccataagatggaatagtactctgctttatatagagtgagctgtctattcttccataaattaacaaaccttgaaaatactctgttaagtgaaagaagccagaaggggtgaggtagtggtgattgggatgtaaagtgagtaaataaattaattgatagaaaaaaatattgtgttgaatgcaaaaataaaaaatggaaagaagctagacaacaaaaccatcagttatattacttcatttatataagttatgtacaataggactccaggtggtggcacatgcttttaatcctagtactctggagacagtggcaggcagaactcttgtgagtataaggtaaggttaggcaggtctactacatacatagtgagtttgatgccagcgagggctatatagtgatactctatctctgtgtgtgtatctgtgtctggtttttttcttctctgtctgtatacctctgtgtgtgtgtgtgtgtgtgtgttgcaaataaatattatattacaggagagaaattgaactaataggtaaaattgagattagtagttaccttttatagaaaggacatagagatgaaatacagacagatgctgaatttctttagggtggtaataatgagctagacctagaaagtggtgactgttaaagaaattcatgtctatacagaaaaccactgaactatgagtaggtttttttaatatgtgaattttatattaataaaaagaaacaggaaatgtcataggtggtttgactacaatggtaactagaacaagactacagtacttccgagtaccaagggaactttttaaaccaacaaagaatacacattttagggctggagagatactcaacagttaacagttgtgctcttgcagaggacccaggttcgattcctagcacccacatgatagctcacaacctgttattccagttctgttgcatgtttttgatttctacaggtgcagccatcgggcctacacttgtaaagcatatatacatgcagacaaactcccatacacaaagaataaaataaatctaaagaaaaagagtactcatttcagagaaataaatataagaaatagacctataacagtgaggcttcatttatgtcatagaaccatgtgcagtaaataaaatgataagtatactgcaagtgcatatataatatgtcccataaataagtataattgtgtgaataaataagtataattgtgtgaatattccaggaatattgcaagttcaaggtcagacacagatacagagcaagaatctgtcttgggagaaaaaatagtttaaggaagagagatatatggctttgaatatcaggagtaagagtttaaatttatcaagggtagggagatgatgctgattaacagtactggctgctctttagagaagctgagttcagttttcaacaccccagttccagagggtccagtgccgctttctggcccctgcagacaccagacgtatgtagtgcacagacatacatgcagaaaaaaaacctatacacataaaatgaatttttaaaatttcaataagtatggtaaacattggctgtccattgtcatattaggacacctgacaggatgattatcttggtagcttatctgactacagtatgtgattggagaacatgtctaaagcaacaggatcactgttgatgtattataagactgaagtgattaaaactcaggtaagggatggtgatgatactgttaaaagaaaaggtggctgggcggtagtggtgcacacctttaatcccagcacttgggaggcagaggcaggtggatttctgagtttgaggccagcctggtctacaaagtgagtttcaggacagccaaggctacacagagaaaccctgtctcagggaagaaaaaaaaaaaagaaaaggtgttaggaaagggacatgtacaaacaatattgacctcctgagaaatggatctggtctttggaagatgagcatggagctggaaattgattgttgactgaattgcttaattcattgcctaaagcatattttgtgatagcagagagatgtgatattagtaggaaaagtagttgtagaggaaaaaaaataatttctatgttaggttagttataaagtataatttagaacttaacaatatacgtttgaacaaagatttaagtttagagagctgaagagaatgttcttagagaggactcaggtttggttcccagcacccacatagagcttctcacagctccagggaatcccatgtcctcttctggtctccctaggtaccagcacatgtgtagtattgactcactcagacatatacacatatgggcatataagtgaaaaataaatcttttttaaaatattgttttttaaaataacttttttttatttgtttgtgggggttggtttttttgttttgttttttcgagacagggtttctctgtatagccctggctgtcctggaactcactttgtagaccaggctggcctcgaactcagaaatctgcctgcttctgcctcccaagtgctgggattaaaggcgtgccaccactgcccggcgatattgttagtttttatagtagtgatatatactctgtaattggatagcagtcttacgtcaagattacaggttttgcaattagatagtcctgccagctcacctttagtaagggtcactcttgtgacctggaaagatactagtccttgggggtttcattttgtttttttacctagagataatgttgtagattttttaaaaatatatatatatatacatacacacacacacacacacacacacacacacacatatatataatatgtctattttaagtgggctgtataacagcttctctgttgtttttaaagttgccatccttactgatgttgttatgcattaaggtggacaaaaaaagtttctatcaaataatagagtaattttgttttgcttttcagtagttcactaaaatgatagccatgattgtttggtaagtaaagtaaatgcataataaggcagtttgtaattagactaacatccaagtcataattattgaatgtgtaggtgtagctaacagccttcatttctggtaagagactttacttagacggatatgtttatgtgctcaagacagacagtttcctggaaggaaactgtggtctctagttctttataaaaacattgtctttaatctctttcaactcagaacattgccttgtacagactgtttcttcaggcacattcttggcaggaataaatgaagcttccttatgagccttttaagacttcatagactgtctgaaagatggaaaaactggatatttaatcaggaatctgaacatgtatttcaggtagagaattccaaagataatgaagacagtattttacaaagagaaattcctgccagacagtctcgacgaaggtttcggaaaattaactataaaggagaacgccaaaccataatagatggagtggatattaataactacctttcggtgagtatatgtcagacttttttatggatccttgattttcacataaaatgtctttaatttaagtggtttttggtctctacatgtaaaagttatggtaaaataaacagtttttaaaaacattactacttgactgttggattaactagaaattttcttatctgtgggaattttgctttagctttagttttacttagagtaattaaccaaaataagtatttgtggtagcttagtacataaatttgtgaattttcttgcctttgtagtgactgaattaggatgtaaattaaatctgagaactcaggcagtcgactaatgggaaaacttaatatgatggaaaaaataacaaaagaaagaaaaccatggcagttctccttggcctgcaggactgttagtcactcataaaaacaggcactagtgtagaaatgtgtattaaagtaaagaagcaaatgaaacattgaactttgttaaagctagagaaaggaagctgttgctttagaagtctttttttttttttttttaactctgttgttgcagataacatctttttagactgagaaatgaaataatttgaagaataggcccatgggcatccctacagctgtcctcctttggtctgagttttaagtgacagtattagagagatgggagagttggttgcagaaactgacaagagtctgttgctttcgttttcaggaaagaaatgctctcattatatggcagggtagaagaggatagtcaggaaattggcttactaaaataagaataggattcaaggcagctttaaagagtctgtcacatttgcctaatttcattaatagaatgtgttctgtttctgaaaataaacatactggttccaaaatttgcaactaatactggagccacacagagaaacagtttctttttaaatacacagtttattactgggcagtagtggcccacacctttaattccagcactccggagacaaaggcagatggatctctgtgagtttgaggacagccaggtatacacagaggaaaccctgtcttgagagccctttacctggtatatcatctctgtgtgtgtgtgtgtgtgtgtgtgtgtgtgtgtgtgtgtgtgtgtgtgtgtacacgtacatacatatacattatatgtatatgaatttcctgttactaattaaactgtcttttaccttattatatacaatgactattttaaattttttaaacgtgttgtgatttttaaaagcttatatatagtttaaaatctttgctgctagattttcttttacattttgaatgagtgcatagtgctctattataacaatatgccacaattaactaatttggaactcagtatttgttcatgtgtactttttatagactatatcagtgtcctgtcatcacttgcatacagtatacactgatcaatccaaccttttatatatctccgtcaatactctccctaatctcttgttaatcacattttgcttagattgactgtctgtccatgtttctgcgtgggtatgtgaaggtacattcacctgtagtgtgtgtgccctatagaagctagaatccaaatttaagtatatccctctgatgagctataccttaacttttgagaaagtctttcagtgaacctataactcaccattttggttagattgactagccaacgaaacactgagatccaagtttctgtatatatgtatgtacctgtaccattattacctttatagtgatggggactctaactcggaacctatgcattctttgcctgctgaaccgtcaacactgccccaaattggttttttcttggcttcgccttgagagaatgcattgtctttctatatctgattgtacagttaatgtaattcagatccttccttcatgcttcatttgacaggattcgtctttatgtcagaataataactgcattttgaacatatactacattttgtctttgtccattcattggtgggttcatgcatcaactcgagtacaccaaggatgggagttgctctttagcatgtttcattttcttttagataggctgttactttattgccagggctgcctttgaatttgtgatacacacacaaggggaaggaagggagtagaagggcagaggtatcaccacatccaactatgctcagctttttataggtgtttttatactgtcttccataatagttcttctaattacaactcatctatagagggtgagagtgtcttttacctgtacatctttgtcagcattttgtggttttggtttgtctgtattttacagttgacttattggtggctatgatgatatcatattataattttgatttattgaataattatgctctatgtcttaagattatattgattgatcattatattgctgccttttgagaagtgttctgatcatttgatcatttttccctctatgggattatgtggagcttctcctattgtttctgagtttcttgactaatatagatgttaatcttgtgttaggtgaataggtggaattttttatattctctacactttttggggttttttgttgttgtatagaaacttatagttgtatttgtcatttctgttcatattgttggtgtttttaggcttatattcaagtactacctatattcagcattgaagtgtatcttctgtgtttttttaattggtttttagtagttttggaagttgtagatctttgttctttcatgcaaggtaagaaatacatatgcttattcattttcctggcaatgtttattaaagggctgttatttctttggtagtttcagcaccttgttgggaatctctctactataggggtgtgtgtgtgtgtgtgtgcgtgtgtgtgtgcatgtgtgtgtgtgtgtgtgtgtgtgtgtgtgtgtgtgtgtgtgtgtgtttgttttatgaagtcttttatctcttctgttctgaacttacactagtgccagcattttctgtttattcttgcttagtgctgtttttgaagttgatactgtcatgcctacagttttgttctatattccttttgtctgttttaggttgtttgtgcttccataagaatttgggggggtcccccccttgtcttgttaagaataccttttttgaaaggggttacattgaacctgcaagtttctttggataccgtggataggaacattctttgtatgtaggtctgtgctcatacaggttggaaggtggtgttggatgccctggagctagagttagaggaagttgtaacctgcccatgtgagttctggggactgaactgtgggactctataagaacagtacacactctcaaacaactgagccgcctctccagcccccaaacattagcaacattaattcttagtatatgaacatagaaaaaattcattttagaggtctgtggcttcctttgttaaattcaattctaggctagttttggtgaagtttttgtatttcttttttaatgtttggggttagagtattctttgtttgatttatacctcttaagtattatattgatttcatgatatatttttcagtaacttcattttttctatatatttaaaaatagtaatgagtcctgacagtgtggtatacaccctaaattctagtactcagaaggcagagacagacagacttctgtgagtttaaggccaaccttgtccatgtaacaagttttgggcctgccagaagggctactcagtgaaacctgtatgtactgaatttttttttaactaccaattttcataaatgtatgtacaggtgcgtgtatacaggaaggccatagaaccacttcaggtttcattcctttggtaccatcgatccaccttgcatttgttttattttattttattgggagtctcttctcactgactgtccaagtcctatttttgcttccccatcactgtggtatatacatccacatcatttctggtccttttatttttgtagtatgagtactagggactaaacacaggctctgatatttgcagggcaagcactttttaccaagtgacctctctacccagcatctgcatgatgacctttttaattttgcaaatttatcacattttatttttcagttctaataatcttttgctggggtttttaggcatctctctctcatttttttttaagtatgtccatcacatttacttctgaaacatcgctaaattttttaaaggcttttctatgtagagaatcatatctgtaagcaggcgtagtttgcttttctgtttgtaatacttttattattacattttaatttccttggttaaaatttccaaaaattctatattgaataagcaaatcaagtgaacatcaccatacctaagagaaaccctttcagcatttttcctctcaggataatgctggtgcatttctatcttatgtagcctttattaggttagtctgtgatctctctagatataattaatcgggcttttatcatgaagcagtgttaatttttaccaaatttatagagaatgactataggatgggttttttgtttggtttgtttgtttgtttttgcttgtttgctttatagaatagagtttagggcatggaaaggtgagttgatggggtagtagacagaatggcagggcttgggggaagaagaggagtagaggtcggccatgaacatgtggagaaagaggaggtagggggatgaggagagagaggacagagagggaagagaagagagcagtatactttgtcctgatgtgatgtattttgttagctttcttatttgtgtgtgagtgtgcagacataaacatgtgtatgtgtgtgtatgcatgtgtttgaaggtacccatgtggagaccagaggacagacttagttgctgttcctcaggcactgttaactatcttttttggagacaggatctctcactgatttgaaactcaccaagtaggcaagtctagctgatcagtaaaatttagagattatcctgtctccaccttctcagtgctgggagtatgagcacttgctgctgtgagaaatactatctatctatggccagtctcaaagtcacagagattatagtcctggaattaaagttgtgcaccactaaacctggtttgctaacccttttataaatgaattttcaattttgaactaaaattatccccactgagctacctccattgcccctgtttactaagtttttaaggcccccttcccccccctctctctttctctctctctctttctctctctctctctctctctctctctctctctctctctctctctctgtgtgtgtgtgtgtgtgtgtgtgtgtgtgtgtggtttaagttttctgttctcctccactttagaaaatttttgttggggctggagagatggctcagcatttaagaactacgactgctcttctagagatcctgagttcaattcccagcaaccacatggtagctcacaaccatctgcaataggatctgatcccctcttctggtgtgtctgaagagagcaatggtatactcttatacataaaataaatctttaaaagaaaacaaaaaaaaagaaaagaaaatttttgttgattttatatttgaagaaaaaagcaaacaaatgaacagtcatgaggacctgaatttaatcccctagaagccccttgtaagcccatgtgagtggtatatctcttttaatcttagtacttctgcagtaaaatgggagctacagactggaaaattcccagaaactcactcaccgtctagcttgtagaatagctacaagcaaggtagaacatctacctgcctcaaacaaggtagacagaccgcaaggaccaacagcacaagcttgttctctaactgtcctccacgtgcattctcagatccgtgttctcatccccctccccacttcttaatttcattgacctcttgcattccgtccaatctttgctgtttctttttgtttttattaattttggttttagtttggttttacttattatgtcattgaggtacattattacattatttgctattctgttctttgctgtatgtaatgattgaaagaaaattcttagtactgtttttgttgtattctagttttattgctattttcatttgttttaaaggatttcaagtgctctggtgctggctaaatctctattaagctccttacagttgtattaatttcttaagttcttcttagtctattctcaggtacacatgtctctctttctgcctgcttttggttctttttgcatgggctgccttgtctagcctgtcactttggtctatgtgtgtcattactgataaaggccccatcttgttgggcctttaaaaaaaaatccatgtagcaattgtgtcttttaattggagaatgtatttatatacaagattactattgatgaaggcatagttctatcatttgttaattttcttctcattgtttatttaaggctgaggatcttggagccagggcctagtataacttggcgctctacgtctgagtatgttaagcctgtcatcattttggttgtcctttgtccttttcctattattgatctgtatgttttactgactggtgatgttggattgttttctctttttcattttgtctcttctgagttttacactgtatgttttccctggtagttctaatctgtctttcactattagaggatttccctaagtaatttttctgaagcttgtcttgtaatgacttcttctgcctgtcttggacttttcctcgatttctctgggactaacagtctcaagtggcagcttatctcttacagtacttcaagtatgctgagaagcctgcatagtcctaataagataccttcagtgtgatatggcaggcactgttctgtagaatttgtagaattctgtttcttattcttcggacaatttgactataaaatgtgatgttgaagatattttctggtcagccctgtttagaatcctgtagaccttcttgtgctggatgtccttatgttctaacattttaaacttaaatttttaggagatatagaaatagctgaatgcttatgagcactgtttgctcttgcagacaaccagacttagattctcaccctcacaaccacctatagttccaggggttctaataccctcttccctgggtaccaagcacacaggtggtacacaggcatattcatggttcacaaacatccatgctggcaaaacacacaaaaatatataaaatgaaagtttatctttaaaaggtaaatttttaaacttttttataacattgttttgttttagataacttcttaccatgttgcctagattgacccaagctgctgagctcaagagatgttcccagcttggcccccctaatagctagaactataaacacataatcaccatgcctagcacatttaatattcattaaaacaatatgtcatcatttgttcattgagcttctaatacttggtcattaaacttatttctaggtttttgctttttaaaatgattttctatgaaatattgtagatatgtatctcagtatattaatcacactagaaaaaattacaagctatagcattgctaaatgaaaggatgtttattccatttggctctgtgtatgatgagttaaagagtacttataatttcttatgtgtgcatgtgtggggcacctacatgtgtgtgtgtgttgcttgcatactttagtttaaactttaatatgttctttctccagatttttgtttggtgttggtgtcatatcataagacatagagagtctatttcctcttgaggtctatctatggtttatatatatatatgagtcatttgcttttagtcttcctgtgtgctgaagtaagtcaccttactttagacattttggttttctgaatagattaaaccaagcagttagtacctaggattttgttgggtgataattcttgaagtggcatttttgcatatatatcgctgcttgagttgggtagttttcctactaggtactgtcaggaatttggtaaattatgaggggaacgtaattgatcaactgagacaaatctgatgatttagcagtaagactagattagttagtgaaggatttttaccagaatacttatgtatatgatatcttgaattaataatttttttcttagaaaggatatatttcaggcaatttagaaaatcttactcgcgttctcacgcccccggccaggaagaacacaacaaaccagaatcttctgcggcaaaactttattgcttacatcttcaggagccaggagcgcaaacccccagccccaaaagcgaaagccaccccaataacgaaaccgaaaccccttccctatttaggagagttatatttcgcctaggacgcatcactccctgattggctgcagcccatggccgagctgacgttcacgggaaaggcagagtacaagtagtcgtaaaatacccttggcacatgcgcagattatttgtttaccacttagaacacaggatgtcagcgccatcttgtgacggcgaatgtgggggcggctcccaacatctcccccttttcttttaataagagcaaataggccacccatattaatgagagtggagatagaggtcaaatccccagtgtgtaggtaaaggagccgtacacataacctcctcccaggctcatcacccagaggggtcctggtctggtcccgtgttgtttttcctgggggaaggacacttgaacactcaaccttcttgaaagatgacatgtctccctagaataggctcattttatgccgcagagcccttctattgcagtgcttagccgtgcaactctctcgggctgctgaagcacactcactctatcccgtgcaatgagactagcctcatgggatataagagctgagtggccagcgacctattgcctaagcatagatatatcaggggaagctccatgttctagtcctgcaagcgcctgggcaataaccaccttgtctctcctagtttgggccttaagcttacagaccaatcaaagaagcaacactaatccacagcaaagtgtatctccaaataatatcaatcccacccattctttaaagaagggaaatgctgaggagatccaattgggtaatcctttggtcagggacaggtccaagcgcgtggagttgacctgaagtctcaattcccgaaggatctgttcaaattcagccgtccaattctgtaacatatactgaaaaagactttttgacaaattagctgccctagtaaatttaacatactgaatggaagtaacacacaatcccggaaacttttgtttacaccccagctgagttatttgtcataatacatctagttgtatctggacaagatctatgagttgattaaccagcatgagacctccctgtatcatgacattagctgaggcctgtttatctatgactgtagtcactgaggctgacaaagtgttaatggtgtcagtcgtctggacctgtccagacagagccaaggctgtctgaatcaaggctaaacccagttcctagttagtggtaaaaaagcaggagaatacttgagcattatacatcaccgtcattgggagtggaaatgtcgacattatcccccaacgctgctctctctttattattgacgccctggacatcaccaagacgagggacatcagtattcccttggtcagtctggatttttcgggtgagtctttctggtatccaaaatgggttgtcttcattctgtgggaaaacacaaaccgctcccctggatcttatcaaaatgggatccgggccataccatttattatcaaggacatttttccatttaaccatctcattgggcctatctggctctgaacaatgacgttcagccgcagtatggccatgagcatcaatatttaaaaaattgagtgtaaagagtgccatagacacagacactcttggtgctcggggtaaagtctcctcaaaagttcccctcttctgttttataagataggctttgagggtgcgatgcgcacgctcaacaataccctgtccttgagggttgtatggaagtccagtcaggtgggtcacgtccatctgacggcagaactgttggaatttttgagacgtataagctggtccattatcagtcttaaggagtttgggtttcccccaagcactccatgcctcaagacaatgttgaatcacatgtgaggccttttctccggttaacggagaagcaaacatgatgccagaacatgtgtcaatggacacatggagatattgaagttttccaaaggaagaaacatgtgtaacatccatttgtcagacctgtagaggtcgaataccgcgtgggttaattcccacatgaggaactggcaagaactcacagcagctttgacattgagtaacaatgtcacgggcttcttttcttgtcaaggagaaacgactgcgtaatgtttcagccgtcacatgaaaattgttatgaaaattttttgcagcctctaccggggatgatagggcagcagccaccactttagtggccttatctgccaaatcatttttcagagccatggggccaggtaggcctgaatgggctctaacatgagtaatataaacaggaaatcttctagataacaaaactaattgtatctgctgaaaaatattggcaactctactggaaggcttaatcactccagccacttctaaaagatttactgcattaaccacataacaggaatctgacacaatattaaggggttctaaaaaggtttttaaaacttctaaaaccactaaacattttaccacttgaggtgaattttcattatattgtttggataccactttaccattagccacataggcacctatgccagtttttgatccatcagtatataccacaatcccatttttaagtgggtttcttactgttatttgtggaaacacaacagattgattttgggcaaactgtaaaattggatgttttggataatggttatctatttgtcctgaaaaggaggtaactaaaactgcccaatcattagatgtggctgccaaggtttgaacctgtgcagcggtataaggtacaattaaaagatatggacttcgcccaaagtgggtgattgctgttttaggccttaagggcaagctgtgcaattgcaannnnnnnnnnnnnnnnnnnnnnnnnnnnnnnnnnnnnnnnnnnnnnnnnnnnnnnnnnnnnnnnnnnnnnnnnnnnnnnnnnnnnnnnnnnnnnnnnnnnnnnnnnnnnnnnnnnnnnnnnnnnnnnnnnnnnnnnnnnnnnnnnnnnnnnnnnnnnnnnnnnnnnnnnnnnnnnnnnnnnnnnnnnnnnnnnnnnnnnnnnnnnnnnnnnnnnnnnnnnnnnnnnnnnnnnnnnnnnnnnnnnnnnnnnnnnnnnnnnnnnnnnnnnnnnnnnnnnnnnnnnnnnnnnnnnnnnnnnnnnnnnnnnnnnnnnnnnnnnnnnnnnnnnnnnnnctttttctgtggctatctgtaaaccccactgacttaaagttttaagtagaaaaggatatgccttttgtagcatggtaaggtctttatggcacaggaggatgtcatccatgtaaaggagcaaaattaaagaggggaattgttccctcactggcaaaagagcttcttgcacataaagttgacacatagtaggactattggacattccctgtggtaagaccttccattgatacctcttatcaggttccatgtgattaatagagggcatggtaaaggcaaatctgggcctatctcttggacacaaaggtatagaaaagaaacaatctttaatatctataataattaaattccagccacgtggtaaggcggaaagtacagggagacccctctgtactgggccaaataagttcatttgctcattaatggctctgaggtcatggagcagtctccactttcctgactttttcttaattacaaaaattggagtatttcaaggtgaggtagagggttcaatatggcctagttttaattgttcctctaccagttgaatcacagcttccagtttttcagaggataggggccattgaggaacccacactgggtcccctgttttccatggtatgggtcgtgctgccccaatggccactaaggaaaacccagaccctgtctgtcttggtttccattaggtgagatgggctctatccttccctgttcttgatgtcctaacccttttccttctttataacccatctttgccatgatattttttgctttagctgaataccctccccgatggggcgttttcattggacaaaataaggcccaaatgctgcataatatcccttccccagaggttaaccgggagtgggagcacataaggtatgaatttcccttgctgccctttagaggattcccatgtcaaggcaatggagcttatagtgggacatgattgataacctaggccctgtaatgaatgagatgactctgtggtgggccatgctttgggccaccaatgtgtagaaattatacttttatctgctccggtatcaaggatgccttcaaactcttttccgttgatcttaaggcggagcttaggtctatcattcaaagatacaaccaaataggcagaatcatttcttgaggagcccattttctttatctcaggtcctgcaaatttctccctggtattatcagggaggagcagcagctgagctatcctatctcctttactaatagaaaaaacgcctttagggcttgagcacaggacctgtatttcaggggaatgttgacaatccataactccagggtggactactaagccctgtaaggtgagtgaaccccggccgagaataaggcccatggttcccgggggcaaggatggtataggctccactggcaccggctgaatactcatttgaggcattaataggaagtcggaggcggcacgcaggtccacccttgtgggtctttctgggtcgcctctctgactgcttcctgggtcctgacaaactggttcccatatctttgagggccctgggaccgagggcccgatgacccgttttttggcacataagctgattgactatcatgtgggggaaggattctgccctttatatccctcacagagcgacactggtcggctctatgataacccttgtcacacttagagcaaagagtgagagtccctccctgtttatctggagctctgcaatctttcttaaaatgcccaggctttccgcagttaaaacatgtcctctgattatttctgcccatggagcggttttgggattgaaggatggcagccgctaaacctgcattgctgagaggtcccccaagctctcgacaaaccctgagccagtcttgtaagcctttgttctttcttggggctatggccgctcggcactcctttgtggcttgctcatagatgagctgttctatcaaaggcgcggcttgctctgactctctaaaaatacgctctgctgcctctgtcattttggccacaaaatctgagaaggactcctgaggtccctggattatctttgttaattgcccagtggcttcacctgctcgggagagcgcctttcaggccctaatagccgtggaggaaatttgggcataagctccccaatggtagtttgtctgatcagcagaataagctccctgacccgttaacaagtcaaaagtccaatctctctgctctggagtcaaagcagctgcgtttgttcgggcctgcgcttgtgcagcttcgtgccaaagagctctccattccatatatttgtccatactagggagagcggcttttacaatcgtttgccagtcagcaggagttagtgccatgccggcgagcctgtctaactgcaccaaggtaaaattagcattggttccgtatttacggaccgactcggcgagttctttaatctgcacgtattttaccggagcgtggacacgcccaccctcggctccttcaaagactggaaatgcctgttgtatttttctttgttcctctctgggaatgaatgagtctgcgcactgcctctctgcgcactgtctctctgcgcactgcctctctgcgcattgctgacgcactacgcagggcgggggctccgcatagggcagaccttgaaaccgactgcccggaggttgaacagtacgctggctttcgccagccgcttttggcttttttcttgaccaattagctggctggtaatgggctgcttcttcctcccagtctgtttcctcagaggagaattcttcatctgcttcagagctactaagagctggcttcctgagctcatctagtgacgagtatctcctagagaccttcgctaatcgatcttttttcttttcttttttcttttccttccttctaatctctccccaggtattcttacctgacctaaacttttcctcgggttcaagacccttggaaaggcctgtatacttattttgtgtaccatattttctctttgctcctactctctctccccgctttacttctgatagattgccctgaatttcatccagaattttcagccctatcttaatcacctgataacatgtgaaaaggaacaaaagggctcctaacactagaaaaaattcaaggccaaacataccttgtaaagccattttccactttacttctgatagactgtcttgaatttccttagaaagttcaagaccagacttaccttgtaaagctgtactcactggtactctgttcccccagctgaaaagttctgaattcatgcagttgaatccttcttaacagtctgctttacgggaacctttattaccgcgacccgcagttctggttctggaatgagggatcttccttgcgccggtcccgagttttcttgtattttttcgtcccgggtttcggcaccaattcttactcgcgttctcacgcccccggccaggaagaacacaacaaaccagaatcttctgcggcaaaactttattgcttacatcttcaggagccaggagcgcaaacccccagccccaaaagcgaaagccaccccaataacaaaaccgaaaccccttccctatttaggagagttatatttcgcctaggacgcatcactccctgattggctgcagcccatggccgagctgacgttcacgggaaaggcagagtacaagtagtcgtaaaatacccttggcacatgcgcagattatttgtttaccacttagaacacaggatgtcagcgccatcttgtgacggcgaatgtgggggcggctcccaacaagaaaatgctacattgacagtcttcataagactctgaactagctgggagtggtggtgcacgcctttaatcccagcactcaggaagcggatttctgagttcgaggccagcctagtctacagagtgagttccaggacagcccgggctacacagagaaaccctgtctcgaaaaaccaaaaaaaaaaaaaaagactctgaactagtccaacttttaaagaaatcaatatgacagtttctcaaaactcaaagtaggtctgctgtttgagcagctgtattgttcctgggtattgacctgaagaactccaagtcagcatatcacagaaatgatgcacttgcacgctagtgcttatggcagcactgatgcacttgcacgctagtgcttatggcagcactagtaaaaataggtacgaaaccacttagtgcttaacagcagagaaacgggtaagggaagcatggtgcgtgttcacagtggaactgagagctgggcagatgttcccttgcaagcatgacagctcgagttccattcttagaacccacatttcaaatagctagtaatggaagtcccaagcttgtaaccccagcagtgaacaggcagattctggtctccaaagctccctagccagccaatctatcctacttaacaagttctggaccagttaaagattgtcaaaaaagatggacagcacctaaaaacaatagcttctaactacaacatatacatgacatatactagttagaagctattctaacaatataactttattctcatgcgtgcatgtgtgtatgtgtatgcacatgtgaacgcatgagaataaagttatattgttaccaagaaaactggtgcaactgtagaatcatattgtgaattaaccagccacagacaaacaaaatgttttctcttatgattgttagatcttatatatgtatacataaaattatatgtgtggatatatagatatatgcatgtgtgtatgtagtatatatgattaaaatagaagtagaattgcctaggggaacaaagacatggaagggagaaaggtaagaaagggggctttagggagattgaacagaagggaaatatgttcaacttagaatatgtacctgtacaaaaagaaaagttaaccaaaatttaattgtaagtttgaatgcttctttgaaaaaactcattggaataaatttataagactaaattttttcaaaaagaaaaatgaggttctagtttctgtgaaagcatttacagaggattgggttataaccactgtaaagtcctttattttctttgccttattgtcagcaattcatagaacaaaatgagaaatgcttttatttgatagtttttgtttactgtgtagctctggctggtctggaactttgttatgtatatgctaggctgctctcaaactcacagagatccatccacctacatctttgctagtctcttttattcaatttagaaccatcaaattttttatgctagggtgctaaaggtttgcaattcttaaagatgtacagaatattttgccaatgttggtttttttgtcacagtatttacagcatagccagtacattataattttgtgagaaagaatttagatagattttaagtttttcttaccgaatacttagaataggtgcagaagagctggaatatagctcaatggtaaaagtgaatacttagcactttgcatgtgaaagacagaatgactgaaaaaagatggcttactcatcatttggaatatttgacttttttttttttttcgagacatggttactcatgttattccttgctgtgctgcaactcactctgtagaccaggctggccttaaactcagagatccacctgcctctgcctcccaagtgttgggattaaaggtgtgcgccaacactgcctggctggaatattttgctattaactatagaaaatagttttattgtgatgttttaatatataactgtactgtgatcatattcattcctcccagtggcaggcttaacctcagtgtgagataatgtaaaaaggaatgtagtgctggtgattgacctcagcaccttctgtttcttgactgagctacgtgcccagccttcgtcttacttttgagacagggtctcaacagctacacaggctgtgcttgaactcagtctgtagccaggtcagggttgaaacttgcagtctcagccttcaaaacagctcttaagtatgacctgtgcttccaggcctcctctagtagtcatcttcaaaacttcagtctttgtaacagtttatgtttctttttaagtttattggctatcagtagcacataactcatacctgaagtttgatgttatagcagtcagcatgatcaagatagacatttttatcactcccagatgctttatctcttttttaatccatccttctctaaatccctgttttcttaggcagcctctgtgctttctcttagtgttaattagttgtattcactgggactttatatggcttactgtgttacattattctttttgcctgtcatcttattcttgtttcagtgattatgtgatatatccatattgtctatttcattatctttccacttttttgctaagcaatactcaattgtttcagtatggcatgttttgtttcattttctacctgatttaattgtttcattgtagcaccgttatgaacggttgtgtatacatcttttttgaaacagttattttcagcttcctaagttaatactcaggagaggtgactagatcagatattaaatgctacattaaacagaacaaatgtaaaacaaaacagagaacctgttcttcagagtgcctgcacagtttccattctttgttgtattctttcctttggtctaagagacaaagtaacttgttcctcctccttattagcacttgatagagtcagattttactagccttcttccgaaactctaatattatgtacattgtggtttaaagattttaagtaatcttgttgctgtagggataaataaaaccttgtcataatttagttattttggacattgtaaaatcttctcagaccatggacctttgagaaagatgtatttagtatttagaaatagcacaaagctgtttgttttataaaaaatatttagagagtagaatctgtaattaatccatgtagagagagtccagcatctctagatgagctggctgcctatagtccctcctcctttagtactcacattgtgcttaggttgctttgccactaaagcagtagtgctgactccttacctgcctgttcgctgggcttctgttggggtacttgggatataagcacacacctggtgcgtgattcttggtacctgtagactttttctccctcagttatttaaaatgtatgtttcagtttccctgtgtcatttctctaagtgctcactactattttgttgtgagaggtcttgcaacatatgacttggttattttttaactcatgtcctcttctgtcgttcatgtgccactacccctgccttaattttcctcataggactgttataacgtcacccaagcccactcactgcacaaactgttttcatctggattggggatatttcttaagatgagaagtattatgtaatctctttatcaagacaaatgtacttagtcatttttgtatttgattttaaaatctgttcaaaattggttctccttttggtaggcttgttcttaatattctcctaccccctaccaccaactggtccattcattttgcttttttaagttttagatggagctctaacaatatccttggtttggttggttggtttggttggttggttggttttgggtggtggtttaccacaatctgtcagagaagttgcagtgatccagcatgtgaggacatccagagtctagaccagcctgtgcagtggaacttgttatgatggagcagaccttatgtggtactgcgcagatgagtaacagccacccacatatggtccctaagtgcttagaatgtggctaatgtaactcggtgtcttaaagttttaactttatttagtttggaatcagtttaagtaactaaatagataaattgcagctgccaggttgacaagcacaggtcctcacatttccagttttgtactttgtttttctatgtatctcctatttttttttttgaccatgccacattgttggtccttaaacaggccatgtttttatataaatctcttgtattcttcattttgttttaaacctccctttattatttgttgctttacttaaaacctgttcatccccaggactcaattctgtatcattttcttcttggaaagatggagcatgcacatgtgcttttagaacatctgtcaaatgtgtacgcttactctctacattacattgctcttgccttaataatgagagcctcattgtatcctcagagtaatttgcctgtcataataacagcacctgtttttttagcttaggtaagttttcttagttttatgtgtctttggtcaagttgtgtgagctttattttggtctgagtgtttttgatttgtgggttttattggtagtgttatagttctggggatattggtatgtttaggttgataacttacaggtttattaaaggactttgcctagtgtcttatagtctgtaaaacactcagcaattgcaatcactttcataaagatgttaaagtaaataaagtcaagtaagctaataaatgagaatgaaagtatgagttcaggttaacttgataagcacactgctcgtgctaaatagaatgtggcagcagcttttttatttgcaaataccgctttaccagacattttttttattttttggtccaaactgaatcctaaatgatcatagccatcccttacttataannnnnnnnnnnnnnnnnnnnctattgcttttgtgtaccacattgccatcatttgaatgcatgtctttttttcttcaagtttattgtcttctttcatcttaacctgaatattactgtgcctttctttagtttgatatatgccagcaaaacagtacaagatgttctttgcctttcccttttgtcttagtcagggtttctattcctgcacaaacatcatgaccaagaagcagttggtgagcaaagggtttattcagcttactcttccacattgctgttcatcactgaaagaagtcaggactggaactcaagcaggtcaggaagcaggagctgatgcagaggccatggagggatgttctttactggcttgcttcccctggcttgctcagcctgctctcttatagaacctaagactgccagcccagagatggtcccacccacaaggggcctttccccttgatcactaattgagaaaatgccttacagttggatctcatggaggcatttcctcaactgaagctccttttcctgtgataactccagctgtgtcaagttgacacaagactagccagtacacctatttcacaggtaaaagactcatttctaaagatattagcaacctcagcgtaggaatttcttgaatttgagcatggtgacatgggtcaacaggtaaagatgcttggcaccaagcctgataacctgaattcaatcagctatatctaggagtggaaacttagggggtagagaaattgttcagtggctaagagtaccagctgctcttctagaggacccgggttcagctctcagcacccacatggaggttcacaactgttcattaccccagttcaaggagatctgatgcctttcaaggataccaggcacatgcatacatctaggcaaaatactcatacacataaaattaacacacacacacacacacacttgtttttaaaatactttgaacttgagttcttggtagaaagtacacagagtaagtttctaaacagagatatgtctagtcccaggttagaaggagcaagacaacaggatcaacgtaatgctactcagaaggatgcactatttaaaacttgtagattgtgtattactagaattgtcagttcaacattttcagactgcgtttgcccttgtagttggaagcacagaaataaactttgactgaactgggttgtgcatccttttaatcccagcattcagaaggcagagccagaaagactcaccacaagctccaggacatctcggtctgcagagtggactcttgtcttactaaaaaataataactacctctttttttatagtagttagcaaggccagttgtttaacccaaatgttttacagtttaaattgaagtccctttcttatgtgacagcagtctacctttacagctttctggccnnnnnnnnnnnnnnnnnnnnnnnnnnnnnnnnnnnnnnnnnnnnnnnnnnnnnnnnnnnnnnnnnnnnnnnnnnnnnnnnnnnnnnnnnnnnnnnnnnnnnnnnnnnnnnnnntccctccctccctccctccctccctccctccctcccttccttccttccttcagcctgctcttcttctctggaaggctattactgacctcttttcctaatattaatgctgagcttctgagtctaactctaattttaacttgcttcttgttctttttgttcatagtagtgttgtgccatgtcttctgacagtcttaactttgctcccaaactccattcatccacattatctctggagaaacctctgacgtttcctcgtggactgtacttccctttgtcctttgttggtccatagtacattacatatgcctgatacaggtgcccatacagttctgctccactgagaaaaattaattaccaacttactgaatttgtgaatgtagttcattggtaaagaacatgtgtggtatgtgcaaaccataagttcaatcctgagctcttttttattttttgcataagattaattgcttttttattttatttttatatttgtttgtgtataggcacatatgtgtcatagcatctctgtggctcagaagacagtctccagtgccattcctctcagaaacactttttgttcacctttgcatataccaggatagttggcccatatcaagcttctgaaatttcttgtccctcccttccatctcagtgtaggagtactggagttagagatatacaatactgcatctgagactcaaagctcagtcagtcctcatgcttgtatagcaaatacttttcccattgagccagctcctcagtccacttgccttgttttaaataaagtgtaatagtgaacattttctgtctttttaaaagatttctttatttattttaatgtatgtgagtacactgtagctgtacagatggttgtgggccttcatgtggttgttggtaattgaatttaggacctctgcttgctccaatcagccccacttcctcagtccctgctcgatccagcccaaagatttatttattattatatgtaagtacagacacaccagaagagggcgtcagatctcattacaggtggttgtaagccaccatgtggttgctgggatttgaacttaggaccttcaagaagagcagtcagtgctcttacccactgagccatcgcaccgaccccaatagtgaacatttccctacatgttgttcaatttttaatactagtattaccctgagttaaattccaagagtaagcctgaaacatgaaacatcttgatttttatcaaagtaaacacttgtatctttgactggaaatgaaataccagacatcattaatgctaagtcatttttgtagaaatgtaactgagtcaattatagatctggatgttgttttggaagtttagaaattagttggtgtttgagtatgttagtatgaaatttaggtttttttttactaggtaatctcattgtgatgtatcagtgtggtcttaactggatctcaagcctctcaatagagaaggtcaccttctccactgttaatgcaagtgttgtgattttcctggtgctttctatcttaaatttttttcaaagatattctcctcccccctccgccctccattcactactatctatatctcctagtagaatctggttcactctggaaagtaacatagttcttgatagattcttaaaacaaactccagagtcgtgagtccacaaatcaatgcaattgatattaagtgggagaaatgtcagtttaagagttgttaaagtgtttggtgaaatatatgcttcttacagaaatgtaacacatagaagtaaagcaaggtcctcagagccgaggtagttagtgctggaaaagtgactttcaaaggaatgtttattaacacaaacctttatattggatgatactgactgcttatatatccttccttttaaattttttgtcaactaaaattttccaaaacactttaacattcatactatgctgtatgtttatctcttctggtttttcttctgttaacaaacaacttttatatataaattgataaataactggttatttccttaggattaatacatagaaattaaattactgagttaaaagtatgaaaataactttctacataaatattacagcacagtagtcatatttttaataatttttattatccagtatgcatgaatgttagtgctgcgaggaagacagccaggtatactgttccttctggggcagtttgtggtttcctaaggataaaactaactcatgtggatgtgtccagggacccagaatgagaaagattatcatacttgtgactgtttgcacagcaattgccaaagaaagctcttccaataattgtttaactcaggtcttaatgtatgtcagcagtctaaggataatttttgacagcattccaggtagacaagtataatagctccttaaatggcaaacaaattaacattactgcttttcagattgatctgttctctgttcactaaaaactatgttctgtattcaattttcacaatactagaaaatgatgtgtttaaattagaggtaatagtgtgatccagttcagacaaagtattcttgacagtttatttttaaaatgaaattttattttcttgtttatggattttttaaattactagattttttaaaagaaataactattttaaaactatgttcataataatatatacttgtctgacttctatgtgcaaaatatcttccttctatgtatatagaaaaggcctggtacagcttctttgggtagggcaaagtagaagcatggtggtgccttttattgttccttcagtttcactgattctaattatagaagcttacatcaccatcgctgatgataacagctttcctctctccccttgctctttctttctcaatcactccctaaggatatatcatatttcatagtacatatggacttcaagtggttttgacaaaggtttttgatagcatgcaagcaatcagtgagtacgtcacagtatgctagcacggttgcttacaaagaccaggaggaaagctgtgatgctctttttctttaggatgatgaggagtagataggactggcttcttgaagtcagaaattacttaaggggcaaaaggaattagagttaaccgtgtttgatagctacagattgatttctctaagcagagggaggaaagggtgggacactgtggttactttacagaagctggcgtgctgtcactgcatagcgtgatcatcactgtagcattatcaatttatttttcaggattaaactacttcagtaggattttctacagaaatcaatgtgtttaacagtttacatttctaaaaccaactgcttaaataaaaggcagagatgacagttttattttgtaaaatacttttgttactctctttgggcatttggcatccctaaattgcgcctgtaatgtttcactgtgcagatggggtggcgaagaatgggtatattattaactattagaaccttatctttggttttctatgcagcaaatttccgatattcagtttatagctggcttgtaaattatatatttaaataacaaattttagtaaccagatcatttatatatttataaaaactgttttgtaattattggaaactttgttttatctcacagtagtcaaatgccccttttaaagctaaagattttgtttgtatggctcagcatactggtatttcacatgcaggaaagtgtgttcttcagtgcctgtagtgatgagtctagactgtgaatcaagactccctccatcactgcactgacttcacttgatgatgaggtgagatcatgataaattctaaaggtgatgctcatgaaaaaaaattggtttgtctagtaaatcattttggttatttaacaaattactgacctaatttagatcagtaattagttaaaagattagttattgaatgtgaagagacaatggagggggcagtataattagactgcttttagggtctatatgctgagtatagtttggcctcttgcttcctgctggaaaagcaggtttgttatcccaggaggtttcccatgataggttcaccatactggttctgaaatagcaaatactgtaagataattggtagaataagatgatgtcatcttttcttataagccagccaaactggggagtagggaggagagaaataattgtcttgatcctttattggggttgatgtgtactccagtaggtcttgacatatggcgttagtggcttgcatttcattcccagagcagcagttaagagatgactgtctctttgcccagcttgaggtcttcctttgtgtcaaaggtatcagcatgatttataaaaaggaacaaggagccactgcagatactggttgtggttggctgtcgtttatcctaccagtacatacatgaatataattatagactggcatgatagttaaaataatcttaagtcctgttactaatttttgtgtttagtacatttctttagaaaatgtatcttcagccaaaaatatctttatccatatttttgtatttaagaagtgaatgcttttcctttgtctttaaagttgcatttttgaaattccaacttagtttatattcattaaattggaaaaatagttcttgaaaatcaatctctacaaatggtttatatttagtaaactggtgcttatttgaatttgtgagaacaaattttatatttcagtgtaagttttgtgggaaaggactgggtttttgaatacagcaattcatagggttttgaataaaacaattcagaggcaattcatgtaaaatacagttgtattttgtaaacatggaatatgtgttcaaaataatagcattactacattaaattccagttgtataggagcagcacgattcagattaggagttcagtatcacttggaaagtaagagaccttgcttgagggaatcaaggaactgtgtgtgtgtgtgtgtgtgtgtgtgtgtgtgtgtgtgtgtgtgtgcgcctgcacatacatgtatgttaataagatttattttcagcagtaagcagaatctttcattacaatacctgtttgtcaggtaatcaccttgtgtgttgcacattccctgtcttcaaaagtattatctaaatagaggaaaatagttctgtcgctttacacactgactgctggtctcacagttgtgctgcctggaggtatgcctgactgtattttagccattggggggagcactgggaggcgatgaagtgctaggtgggtggataagcagaagcataaaagaaagggtgccttgtagcagaagcatgaaggaaaggctatggtgcttatcttactgcagagggcgtggcaaattttttctctttaaagttttaaagaaaaatatgacggcttccttttagtccatgttcttatcaaagacaggtttaattgtttccttttctgattcattttgtgttttgctggctctctttctaggaattgcacattgactgcagtgaagtactatgttgtatagattattcttccttagaggaattagtatacattgtacctacatggatttttttttctccttgcaaaaggattgtttttatttaaatctgtttacataaaaatcttggttttgtttaaaaaatatatataaatcttaccacctgttttaatttttaatactaactcaatgtgggcttgaagatttaaccttcagaacattcaataaatagcaagttgtatgtagaaacccataaatttatggtattaacattcctttgatgtgacatctctgaaccagacagcccatgtatttagaattcaatagtatcttactacagcaaattattttcccctgagagaaaattctgtgttaaatttaaataatattagaaaagagacttttcaaatacaactgaatattaatgtacagaattgtaaaaactataaaatagatgggtacattagccaggttttgtgcttacaggatttagcttgccagcgtgtctcacagaaggtcgtgtgtgtgtgtgtgtgtgtgtgtgtgtgtgttttcgttcagtaaattgctcttgggctacatctgcagatacagtagccaattgatctaatgcagtttgtgaaggctttctgcacaggtgatgtcatccttttagctctattctcctcccactctctttccttcttattagatatttcatcttactgcagggcatagaatcaataggagcttctccttagggagctgctgtgaagcaggcaaggacagcaggaattaagacactgacagactcttgcgttcacaaaagatgtagtggtttttgtgttgcatcgtatatacatgttatccagaaagggcagacttagatcatcggtgctttcttactaatgcctggaatcagaagctgtattgcagagctgtgaaactgcttgggagaagagaaggttgctttgaattctggatattctcagacattatacagaacaaacctgttagagcatttgtctcctgcctccatttgctctcgatgatgtatgtgtatggtgggatttttttgtttcgtcttttgttttggtttggtttggtttttaacctctagcatttaaggatatttaaagaagagactgtagtcttcagaatacagcatttgctttgcctctgatgcagaagactctgcagtgtttgctcttccgaatgaaataagttgacggaaaaccagctatattacagagaaaggtttcacagattccaggaacacagatttcatgcatgttgcctacttgctttgactgatagatacgatattagtctctttgctgccaatgtgtatgtctatgtcaggtgcctggggatgcatgtaactgtgtgctgagcctgaaatctaaacatctttatttgatgttacttgcttgtaaagtggcatttaaggataattcttatactgagaacaatattctgcttctgaaagcttctgatttttgtttgtaaagagggttggaggagctacatttatatagcaacaatggtatgtggattataaaagaaacttagcagaattttgtcaacatactcgtcagtgtggctctctctggtttaaaagagaaactacccctccagccaaggaaatggcttttcttgttcgatgttacgccaattgtcttcagccatgggcctccaaagtaagtgattactatttttatatagtttaatcattaaatttaaactgcacttgaattctaaattagttctattgtgctaataacaactataaaacagtctataaatccttgtctcaatgtcatgtgatttagagaaagcctctgagatgggttgaacagactcaatagtctgcaacttgaaatgtacatatgaatgtacatatgaaatgtacatatgaaatgcacaccttagacacgctcatcactgagctgttgatatttttaaaattacttgtgcccatgcttaacttgaggcattctgttgtttctttccttaaagggctagtatgtttagacatcgtgttcagatcatgggcttatagaatgtatcttggtaatgtgatgctccctgataacttagaaatgaattgttctagtttgtaaaattgggtgttcattcctaaagaataatgtaaaaaaaaaaagtgaatgtaaattaattatgtaaaaatattcagtgttccaaagtatttccaaaatagtaattggtaaaaaaactgcttgtcattttaaggcaaacattaactgtcaacaaaatcctgagttgttgaaaactagtctattgcaatttagttttatttttgacagtagctttttacagtgtttgaaggtatcttttagattttagaaaatgcttagatgatgaattttaaatatgtcaaaatttctttatagttctctgatacttaggcacactggagacttttcataggaaggtctgaaatcgtgtctttgtttcaaaggttcactcttgatggtgactaaggagaaaatactttgatagcactgtgttgtactgtttatttggccaagcccattgcatatctttcctgaatgttctagtgggagggatatttaaatgcactgtccatttggcaaacagctgcctgtgacataaagagatggaaaggagccttggtacacagtttgtgcttttatctgcacatacaaagagtggctgcttcagtgcagacgccacctgtgggcccccagcactgctgacagtaatagtcacaccactagaattgaaaactgcacatggaagggaattgtataagaccagataagactgaacaaaattaagatggggtgcaggaggtttttttttttttttaaaggaaacacacacacacacagtaacagaaaaaaatgagaagaattctgtgatgagtgatgattgctttcctgtataaattatgtataagtatacatgtctccttcctgtctctctcatctttgtgtattactattaagatttaactctttgtttaaacacattagactagaaactaattttaatacttgctatattggattttcaaatttgttttactcctttaactttcatttaatgattttttattacttagttatatataaaataagcttgttgtcttttctctatagcccttgaagctaatacatgatctgctattcatatgagaagtttgcacttagtgttgtatgttttgttttgttttttttaaatatccatgaaattcatgaagcttcaaaatgttttgttttccttcttagtactctgaagactttttaagccacagagccttgtttgtctttacttgaaagaaggaaaaaaaaagttccatttttggcataggatcctactatatagccctgcctactcttgggctagcattgtagagatctgcctgcctctgcctcccaagaactgggattcaaggtgtgtactaccacacctagtagaacttgtttttgacaaaattgtagcacctctcacttttcttcacctgtaatgtccttaaacatttatttcagtttgatttttctaactcactaatttattgtctctttgtaactagtgctagacatgttttaaaatttaaatgtacccatttgtgttatatgtttttgaagcctcatgagtgatgctcacaattacttgttttggtaatggtttttattttataggcgtgattctgctccctgtatagattcttgtctctgggtcattggtttccagggatcggctttacacaagggatttttagctggatgctcctttcactattggataggactgtttgattgaggtgtcatctcactgtgaagaagccattgtgctttggcttcttttttctacttcctgctgttcacaacagcaatgaaaaaaaaatttttttttgtgagccaatgaaaaaataataaacagctacctttgtcagtcatacctggcctttgccttactttacttctttaaatttcactttttggaaaatgagtagaaattgagtttgccatgcctcagaaacaacatgtgatctccaccaaaggccactgagaaacttagaacacatgtttcttagggtcaggtttctgtctgaggactgctcttgagatcttacaatctatttttttagatctcgctcgctctctctttnnnnnnnnnnnnnnnnnnnntctctctctctctctctctctctctctctctcctctctctctctctctctgtcagctattggttatgtgactctgctctgtactaaaagttccttgtaattttggtggcttagagaatgcctccactttccaaccagggctcatctctatgactttgaaaagaaaataatgtcttaaatgtttctagagtaatttttaggagcccaaaatctcttacaaccactttctctcttaaatattttcagaggttcacttttttttttaggctgctgaaatataattctattccttttttttaaattttatgttatttgtacttcatttttacactccatattccattccctgcccttccccatccatcctctgactgctccacatcccacacctcctccccatcccaccccatattcacatggatgcccccactccttactgcacctgacctctaaactccctggaacctccagcctgacagtagggaagggaacttatagagcccacctccagcagaaagacagggcatcaagtgagggatggtgttgccatcccacagtcacacctctgacccataattgtttctgtctgaaagaattacagggatggaaatggaaaggagcctgaggaaaagaaagtccagcgataggcccaaaatggggcccagctcaaggggaggtcccaaggcctgacactataactgagacttgggagcactcacaaaaagggacctagcatgtctaccctctgaaagaggttcacttttaagacaggagttgtaagcactcaggagtaccctgtttgaggtttgggtgagaaggctgtactagtatgcacaaagcttctatctccatcacttccaaacaaacaaacaaacaaaaagaaaaagaaggctgctactgtcctctgtacccttacctgggctctgctcttctgctatggtttctgaatacatcataagcctctgggctcaatgccacttaacagaaatatagtgtgaaaattgggttagattaatcttaatcattattaaatgatagtccatccaaaatatcatttcactgtataattaaaatataataattagtaatgaagtattttaccttttgtgctcaatattataaatttcatattttaccattagaacatatcacaggcaggcctaagcacactgcacttatgtaactagatttattattttatgtactatgtttctaggtctttgttattattatctgatatgtttatcaaaatattgattatcctaatgatttgccccaagcatcattctcaaaattacatcttgttattctaatattttattttatttatttatttatttggtttttcgagacagggtttctctgtgtagccctggctgtcctggaacgcactttgtagaccaggctggcctcaaactcagaaatccgcctgcctctgcctcccgggtgctgggattaaaggcgtgtgccaccatgcccggcataatttcttaatctcctataccccaagacttaaatttggatatgcctaccattgggtatacagtagaaatccctatctgcaaatggaaaattagactgcaaggcatattagcaatgtacttatatgtacactaattagcactaagctctaaaatgtcttcctaaaagcaatgagtggaaacttatcaactttggtacatagataagactggtcttccctccctcatcccccttgttcgttttaagtttaacaaacaagtaagtggcttctgacaaagtgttgctataatcaagttgttgatatcttgaaaaggaagctttaacagtacagtttagatttgtaaagaattgctatccttaagagatacacaattttaaacttcatacagtctgtattgtctcacactttggctccttttgaacgtttttctcaaatgtaacaggttttggatgtgggttgtgagggtccagcattccagatagcaaacgttttagatattttccctgttagaagtcttaattgtggcaggttattctcgaagtaggacatagagctatcttataatattattctggctatgttgcctttttttgtgccagttctggttgatatccttccccatctgctaagctgtagtgttcttcatggctgtgtcttgactaacactagttgccctatgaaagcatttcaaacatggaattgttgactatatcagattattccaaagcaaacataaatttcttacactagtaagatgtcaatagcatattggggaaaataaatttggagaacaatatgtaaaaatagatttctgagccgggcggtggtggcacacgcctttaatcccagcacttgggaggcagagacaggcggatttctgagtttgaggccagcctggtctacaaagtaagttccaggacagccaagactatacagagaaaccctgtctcgaaaacccccccccaaaaaaaaaaatagatttctgtattgagggacttcttgtattatcaagagttgaaggacataaagaatattatcattttccagtttattcaaccattgaaccattttatttacttttcaatattcatgaattgtgtttcctaaaatagtatatacagtttcagagagtctatgctatgtggaacacagacttgacctatgcctgtggtgccccagcactgctgacagtaatggtggcactattaaaatttaaaactgcatatggaagggaattgggtgagaccagataaaattgaatttcatttgttcagaaatgcacaaaaacctgagcagcagtgttgagaagccagttgcagtcattcttttattctacatatgtttaatgaatagactgtgcagaatagacatcactacaccaggcttttgtttgatgggtaatatggggaatattataaaataccaagaaccagaaattctacattgtaacaaatagagtaaaaatacagaaatattttattccctgtaagcttcttatacatgctttgtttgtttgtttgtttgtttgtttgtttgttttattggatattttatttatttacatttcaaattttccggtttcccctctgcaaaccccttatctcatccccccttgccctgcttctgtgagggtgctcccccacccactcacccactcctgcctcaccgccctagcattcctctacactggggcatcaggccttcacaggaccaagggccttccctcctattgatgccagataaggccccttcagctccttcagttcttcccctaactcttccactggggtccctgtgctcagtccaatggttggctgtgagcctctgcatctgtgttgatcagggtctggcagagcctctcaggaaacagctgtatcaggctcctgtcagcaagtacttcttggcatccacaatactgtctgggtttggtgtctgcatgtgggatggatccacaggtggggcggtctctgactggcctttccttctgtctctgcttcactctttgtccctgtatttcctttagacaggagcaattctgggttaaaattttggagatgggtgggtggccccatcccccaactggggggggggggggagtgcctaacctctggatatggtctcaacaggttctccctcccctttgtggtgtatttaagctaatgacatccctgtggggtcctaggaggctcttgctttcctggcatctaggactttctggttgctaaccccagttccctatcccccattgctacacacttctattcaatctcctgaccctctgtacatctcctccatctcctcccatgtctgatttttccccctccccctcttctcttcctccctagtctctcccactctctacttcccttgattattttgttcccctttctaagtagaactgaagcatcaattctttgatcttccttcctcttgagcttcatgtggtccgtgagttgtattgtgcctaatatccacttatcaatgagcacataccatgtgtgttcttttgtgactgagttacctcactcaggatgatgtttttctagatctatccatttgcctgcggatttcatgaagtcattgtttttaatatctgagtagtattccattgtgtaaatgtaccacattttttttttattcgttctctgttgagggacatctgggttgtttccagtttctggctattataaatatggctgctatgaacatagtggaacatgtgtccttactatatgttggagcatcttctgggtatatgctcaggaatagtatagctgggttctcaggtagtagtactatatccaattttctgaggttctgccagactgatttccaaatggttgtaccggcttgcaatcctatcagcaatgggggagtgttcctctttctccacatcctcaccagcatctgtacaagctttattttaattattttgatgctgtattagctcatggcactttcaactccttttttttttttttggcttgtatgttaacatttattcacacactactataaatatcatgtgtattaattatcctcataagacattataataaaaacccattttgaaatccactaatcttttcatcattgtagaaaagcagaatgtggaggacttagaattagatcattcagtcagtgtcttagtcacttagtcttttgctgtgaagagacaccatgactaaggcaactattagaaatcatttaattggggccttgtttacagtttcagaagtttggtccattctcatcatggcagggagcatagcagcatgcaggcagatagtggagcagtagctgagagctacgtcctgatccatagacaagagagactctggtcttggactaggcttttgaaacttcaaagtccgcccccagtaacacattacttctaacaaaaccgagcctcctcctcctccttctgatcctttcaaatagtgccattccctggtgactaagcattcaaatatatgagcctgtgagatccattcttaaccaggccaccacaggcagtaaagtgcttgctcagcaaacatgaggacacacgtgcaatcccaagaacccacataaaaatcaaaactctgcaatgtgtatccttatggtagcaaaacttcctaaagggggcaggttaaagactatgttccacattataggtacacagaacacacatatgttacacattcagttttagcatgaaaggttttcagattatttatagaaataaagaatcaagtatggcagatcctgtaatactgacactcgagagactcaaagcggatttggatgccagcttgtgtagcatacaaagattctgcttcgataaaacaaataactttctccataaggactaagttcatctatatattttaaattggctaaaattcattttgagtcatcagtcctagactttttctagaaaacagcaatattgcttttctacttgtaaatctttccccctaaacccagatgtttacccagggaatgaatgaatacatacatacatacatacatacacacacacacacacacacacacacacacacacacacacacacacccctatacctatgaaattcctatactttaaacatttgtggcatcttttatattcatcctaaagcttgctttttagtttaaaaaaattgagaaatgtattgaggtttaaatgtacaaatctacctcagagttttaaattctggataatacagttagaccttagcatctgtgatctctgtatacatgtattcaaccaactgtggagcaaaaatacattaaacaaatgacattagatttgtttttccccgagttatcattcctaaacaactttacatgccactaacagcctttgcatagcgttatgttttgtttggtcttgtaaatcgtctaaaggtgatttaaaatacagtggaaagaggttagaaggacagcgtaatgactaagtgcacttactgctcttgcagaggatgcaagccagttcccagcacccacatagcgtctcacataacattcatagctgtggttccagaggacctgagactgttctattctgtaggtactaagcttacatatggtactcataacatgcatacaggcaaaacagacacacacccaaaacacataggaaatgtgaatggcttatatgcagatataacaattttcttccattttggaggagactagagcatttgtcaattctagtgtttgaaaggatggtctagaaatcagtccaccaaggatactgagaagcaactccgttccaaaataggctggtaatgactactctcattctgattgattgtttttctccaccgaatgttagatagtttgtaatgcatttgtctttgtgtacctgtttgctttctggtaggtattccaagagccataaggctatgcttttaattttattatatattatttattatgtgtgttggggtggcacaaatgtaccacaaatggatggaagttagagaataacttgtatcatgggtcctggagatggaactcagatcatctggcttgtcagcagttccctttacttgctgaattgtttcaacagcctggtttatatattttaaatgttttcttctacttgttaatataacagttatttccccaaattattctccaaaatggctataccaattatactctgaacagcttatgagaatatcatgttgttgttggtttttttcttccttggtcttggctattctaaagatattgaaactaactaaaagtcagctatcagaggtagggtgtaaaagtaacttgtatacgtctgttgtaattgtccactccgaggattacacctaacttaggcctagccctggaagcctctgtacagtcttacctaggcctagaatgttttcagcctctgagacttgctgccgaataagctcaccctttctagttctttctgatcactagctggctgattcaactcagctgttccaactcaaactcttctccaagctgactgattcaatcttgcttctctgcctgtcctgaattgctttgcctgacctcaaactaactctagcaatctgttctaatctggctccttctcattctctttggcttgttctatctttacctgtgtctaacttgttctctctctctctgcaacctgtctccctatctgtcccagcaaaactgcctattctttcctcctttctttttctgtggtgctctcttaagtagactttttcctgtctgttctcttgagagttgggcatatcctatctgtcagatctttctctgaattgtcactttgtctgcaactcaattaaacatcattttgaaacttgggtgcttccttctacaaactaaatttacttttattgtttgaattaaatgtatgtgttaagggcatgtctgtattccagccagagggattaatagaagtgtgtgctaagtgccaagccacaccacaactagaaacaggtattttcagtaaataacataatctcgggtatcacagtgtgatcaaatagccacaacattagagtttcctccatagaccaaacaagaaatcactccatactgtggaccttttgagtgtctcctcactaacactatccacctgcagatagctcagatctcgactgtatcatacattgtaagccccaaattattttaccctttttttttctgctcaatcacctatagatcaggttcttaaatcccactgttagggtttacttgctttgcctcaatagctcatagaactcaaagacatacgtttattacttagttaagaaggatattacaaaggcttcagcttgagagatgtgtaagccaaggaacaggaacctctatgacttcccctgacaccctcctgtgtcttccctgtgttcagctatatagaaacttttaaaacatgttttgggggttttggtttggtttgtttttgtttttaatagtttctctgtgtatctcagagctgtcctggaacttgctttgtaaccaggctggcctcaaactcagagatccacctgtctctgcctcccaagtgctgggattaaagtcaggagccactgcacatggcactgctttggggtttttatagagacatcatttcatgggcatgataaagttgggatagccacatagaaataagattgtgcagaaaaagtcagatctacttctcaaagactggaaagggagacctagcaaaagtatgtcctcaaaattagggcgcagaatccttggtgggagtcttaactatatatcagaaagggggtcagaggatttatagccaccttcaaggaaaaaaggtaaggaaaggttaattttgtaaactgcctggtggaagagaaaaacctggtttctatggcctgcctctgggagggaactgtaagccaagaaacatgggtgaaagccaaatgagtatttcatagactctcatgtaaatatacaacttgctttcttagatgtttttgtttctttctggaggaaaataagtatttgtttttctggttgctagcaagattaatagttctagctgttttctctgctatcctaacctaagtgatgtcacattgtttagataaatggtaaagccaaacaacaaaggagtcctgatatctgagcctttaggctgtttctctcaaaaggttgtctgtacctgtggagaccttaagtcttcagtttatccagtcagcaacagtcagcctttatacttctgtaatgtttgtagtcaagacatcttccttcctgaatgtctataaaaaacacatgatcttcagcagaccacacgagtccagatatagaatatacatgacagagtctgacacacaagacattctgcagagcttactggattagaagggttaggagtaaataaattgagtttgctggcgaaaggtcaactattaattcagacttggtcatgaagaaaagggataaaatttttctattttgattcttacaaagtaaacagaaacttcagcttaatgtcatgaaacatctacctcatttggtctcattctcagatcagaatatctgtgtaaaggcatatagaatgcatttgctatggttcacaaatgaaccacctaaggaacatgcaagtgttagctgagtcactgtctcctcctctatctcatctcttctctttccttccccttccccttccccttccccttcccttccccttccccttccccttccccttgtgtgtgtgtgtgtgtgtgtgtgtgtgtgtgtgtgtgtgtgtgtgtgtgtgttatgtagtggatgtttaggggtaccattcatgcacattgaggccagagcaaaatatctagtgtattcctttgttgttttttgccttactctcttgagatagggtcaggagaaccctacctggctgttttggatagactactagctaactagccagctggctctaaggatctgcctatctctgcctctcttgatcttgtctctacctcctgtgtactaggaagacaggtgtgtgccaccacacccatctaaatgattacttcaatccccttctaatatgtagcatttatttggttcagatattgtcttgtttccaaagtgataatattgatttataggttgttgaggggttattttataattccccaatatgtgatcatttctattttttgttacagaagcctttgcacatgagtactgaatgttctctgtatgattttaattgtatttttcagctgtgtctgattcttagaaatatttgatgtctgccttaaagaacgaatattctataattttagattatgcacactgtaggtgacatttcttaacacatctttttgttgcaaagagatttgcgctaacatttcacaacatgagtgtgacttcattttccactgttattttcacctttaagttttcttttattgaaaaataattgtttgtgatgaggttttgatacgtttgcatactgtgagatgaccaaatcaaggctagttagcctgctcatcatataaaatttttcttctcggctagagcatttaaaatcttttcttagtttttggaaatctgtaatacattttttacaatgattgttacttgtgctgtgtaatctgtgactacaattcattccttttgtataactgaaacttctacagttctctagctcccagcctctagtacccaccattttattctttgtttctgtgaattttaacattttggttccctgtagaagttagagtatacattagtctttctatttatggttcattttttccttgcacattttgatactgtgctgtgtgttgttttctttcagcagtgtttgtcagaattactgaacccaccagcagtagttcatggtataattagtctgtgcaatttctgtagtttgtattcttaagatagtggaactcaaacttgatcattttctctttaaaatagatatagaatacattgagtgtatgcaacaagaaaacttacttcaaattttaggtttacttaatggtcctgaatagaaaattgaagagaaattatatggaatgatagtgaatgatcttatctcttacttaaaatactaactgctttggagcatagagaattatttcttgtcttaacttccataatattgcttatgatatacctgttttatttcacagtatgagatacattgtatagtctgtgtccttgataagattagtcatatattaaagataaagtggtagagtcgtttgctttttatttttaattacattttatttatttgtgtgtgcacttggacatgctatgatgagcatgtgaagatgaaggacaacttgtaggagttggttctctctactctgtggatccagggagccgttttggattatcatgcttgtagacaagcaccttcacccactgagccattttgccatgtcttttctattcttgtattctctgcacttgacaaaggcattcattggataattgtgatcactaataaatttttcaggagctaagtacagcatagtacaatgttaagaacaaagattgtgaacacttttaaatcttgtacagtcattttgttaaccataagttttactgcctgcagatgctcatctgtaatctcaaacactagtattaattttatttagacatactaccagtgtgtatgtatttgtgttttctattcttgacatttaaagctatttttggttttaaaaaatacattacgtcaagaactctcgaacgagcaaaatttggcattcagaataactcaagttcttttctccttcagcttccagctgatcttaccaagatgcacctcacagacaaccctcatccacaggtgacgcatgtgtcttctagtcagtctggctgtagcattgccagtgactctgggagcagcagtttatccgatatctatcaggtaataccttaggctgggtactgtgcatatggactttttgattctgcttatcctctagatccaacaacctttcacaggagtttcctaaggccatcagagaacacggatgtttacattaagattcataacagtaggaatggtacagttataaagtagcaatgaaaattttatggttggggtcataataataaagggtcgcggcattagaaaggttgagaaccactgctctaatttaactgtgagactcaagtgtaagatttttagcaaagtatgcttaatatgttgtcacattcgtcagcctgattatttcttttatccagttgaatccatatgatagaatgcttgccttaattaagggaaaagtttgtggggttttgtttttgagaaacagaatgttgccctataacctaagctaacttgaaattttcaatcttcctacctcagcctcatgagagttgggttacaggctcatccctgggtttaaagaaagtttttgaaacaacagcttacacttgtgaaaggactgatttttttcttaattataattgtagaagttttctataagtaaaatttatgaagaaaggtagggttgcttttatattataaaacttttgtcctgtgtaaccttagtgaaatagaaagttaaatagggagtgtaattatagactcctccatttttaaagctgaacagaaaattccaaactaaataaggtggttttttttttcccagtgattcttataataaaaagagggttctgagaatcattacaaagtaagagaatttttgcacatcctactagattaaattcaaatttggcttgggccagtactgatttgttaggtcttcatggtagagtgtgatcttgtcttagtgtagggtgtctagggcagtttcctagatgacctgaagcccagtggtagtaaaaaactggagatgcaatattaatggttggtttagttaagaattcagatactactggctggtttatgtgtcatcttgacacaggttggagttatcaaagagaaaggagctttagttggggaagtgccttcatgagatccagctgtggagaattttctcagttattgatcaaatggggagggccccttgtgggtggtgccatctctgggctggtagtcttggttctataagagagcaggctgagcaagccaggggaagcaagccagtaagtagcatctctccatggcctctgcatcagctcctgctttctgacctgcttgagttccagtcctgacttcctttggtgatgaacaacagtgtggaaatgtaaggtgaataaactctttcctccccaattttcttggtcatgatatttgtgcaggaatagaaacactaagacagatacattttgtgttactgggatgactagtagatatttaatgtaagctacatgtctaatttaagcttttcaatagtcatctaaaaggaaacataaaatcaactttggtgatatgttttatttatggtatacttaaatattattttggcatttaagtaatatttcaatattgtgctgagttttgttgcacatactttgtttagatttttttcatacttagtttagatttacagcccatctcagttctgatgtcatactttaatgcatgcatacacacacacacacgcgcgcgcgcatgcaaaacttcctgtttgccttttttacaatatttataaccaaagaatttatcctttctcttctgtagaaatactgtaaggaatttaacaaagaaagtcaaaacagtacagtaactcttagttacctactccatatctttagtaattggtggggttagtatattttgcctctcaaaaaggaagtacattctctgcttctgtgttgttcacaaaggaatactgaagaaggctaattctaaaacaatcaagaggagtgttgtagctgtacttttctctcagaatacttgggaatgtgtgctttgctaagagaaacagtaagcaaagatatgtttctgacaaaatgtaggcacctgatttcactgggatattctatttctaagatagatatgaataccttttttaggcaagaagcaaagccctaatagttgtaacagaaagaatgcagggataatgaacatattaaataatatgtcattcaagtcagtgctttgctgtgtactcaaagatgggttgtatacaactggtatctctttcaagatgctggaagagtgcctgagatccagcactgattatagcttccttgcctactagtgttagttggaagtcttgtattgcaaggtcatgtccctctatgtgactacccttcttgcagacttccatatatcaatagcagtctgcagttttgttgccttgtagctattttctttataattagtcgaaatataggtagacatcttgctgactaaccatattacagagtattgaagaacatactttataattcagttccatgccatcagttcagcttcctatatcactaatcatgtgcctatgtttcatggatattagtgattgtttacatataacaaaatttatcctctttaatatgagaaattagcttagggtctgaaagcattttaagcttgtttgtattcatttcctctcctgatccctgtccttacaaaaaccaatctgtgttctacctttactgttttgcatctccaaaatgttgtgttaaatagaatctctataacaaaagggggggagggtgctttgaaatttataaattactcaataagacagtggtaagttttagtaaatttacagaataaacaagtaaaaagatacagacattgaaattctagaaacaaaacagttactcaaaaatttaaagcagaagaaaattgtggtaatgctaaacccaaaatgcagaagtataagataaagatcttttaagagaggctagttaaggtagaaattatcagacccttactccactaacttttaaggcaattgcctagaaacagaaacattttatcttgacaaaagcagcttagaggaaagggtatgtttgctcacaattccagttttgcagcacagcattgtggggaagtcaatgcagcaggaacttgaaacagctagtctaaattcatctctagtcaagagcaaagaacagtgagttaacggatgcacgtgtgtgctggacttctttctctacccttaacacagtctagaattctggtcgggtcttctcagcagaatcaagatagccctctgtagacattctcataggtcaacctgatatagatagtccctcattgaaacacttcccaaataattctagattacatcaagttgatgattaatgtatgtgacattccataaaacaaagcaaatcaggccaaaaaaaggtaaaagtagaggggtattcttatatgctatgccttaaatggaataaacttaaacaataattttaaaatgtgtgtggaacaattaaaggaacatctactaagagataaattagaacagaataataaagtagacctcaaaaaattttaagatttttaataagaagccatgtgtagcataagaaatatttagaaaaaattgtgtgtgtgtgtgtacatgcgtgtgcatgcctgcgagtgtgtatataaaagagctcagggaataaaacagaggtaagaaaggttaaacattagtactggagccaggactaccattagagagatacttgttaaaactatgaatatactattttgttagatatgaatattgctgataactgaaccaacaactgttaaattacgtggttgtaagtattccagcttttgaaggatttcaagtgtgaacactgagcacttaactatacaagcaaagtattgtgaaatgatgcaagtattttactttggagagttggggttagtactatactagaagcactgtgtagccaagtatgaggctacatactcttaggcactgctgccttttgattttttttttttttttttttggtttaaaaacaaaagcctttgggcttaaagaaacaaaaacattttccactgtttaaaaagaagattacaagtaaggttccaaagtgaatgttttttatcagattatcttaaattttaactcaatgtatccattaaaatgctagaatgttcttagagtgtttacatgtctttcaagaatgtacaggagaatatgaagtgcttctttctagatccttttttctattaactttagtcttatttaacagctggacaattgtaaagcaatagctcttgaacaaatacatttgtctttttaaaaaattttttgatttgtttagaacacaaaatgtgtctctatgtatgggttgtatacttgagtgtagtgctcctggaagccagaaatgggcattacattagatccccttgatcttgacttactggttgttccaagcaacttaggtgccaggaaccaaattcaagtcctctggaagagtaatatatgtatgctcttaactatagtgctgtctctaggcatttgtcttaactcactcttaagtaatctaaggcacaaagccattcattcccccatctgtgtggaaaagaaacagacttgtaagaatcccttaactttcaactcatgttaccatgttaccagactttggtaccatatctctattagagctgctgcttccccccaccccttccccaattagctttgttctgctaaatgttctttagccaccggtctttcaattttctgttaggaatatcatctgttcagtaggggtgtcactcggtgatagatgttacttaaaaatgtagatttgcaaaaaggagctggcacaaaattttccttcagaaagggctatgatctggagagaggaaggattcccacccccatgaccatggtgtataaaggaggcattatcaagccttaaaatgaaagaacattagacaagaaaaaaaaaaatatcagaccataggaagcattatagagcctgcagggaagaggagggcatttcttcagatcctgagcaaagctgtaatcagctataactcccgtgctgtagagcatgactgggttcccgaaagtgaggagggatgcgagagaacctgcacttgaaatccagagagaaggggaagggtgggggcgctgattcttttagcttctctgatgaacagggtagacaagcttcatcctgcagcttgaaggcaggcactaggcagcacataaatgcagcttgtagctgggagaagtagaagagctgcacagtgagcttccttaccaggtctgaccagaggctgagctgctccgagctgtggcctcgtttctggaagaaaaaggcagctagagaatttgtgatctgacagtggagtgcttgcctggtatgaacaaggtcctggggtttaatctgtagtattaatcctaggaaaaatacaaatacaaaaagacaccatctatgcccttgtccaaggctaagttacccactacccacatacagtgccatttaatttaaactcctacttgaaacaaattgcaagaatgtgatggcttaaatagtattctattaatgaaatttcagtgcttcgctcttaccaaactacgaatttcaagcctttcatttcccactaccatctgccatctggttctgtattccattagtttcctacagcacttagagtctgcttcatggcaagagtacatgctgctggaccctcagcatgctttttcttagctgtgtttttggtgttttgtgtgtatttattatcagaataaatttatgcagatgggagtttatgtttttactgatcttgtttcttttgctgagtcaagcactgtggtacttagaagtaatctagaaaaaaattcaaggtgaataatatttgaagtaaataccagtattggtttcaaggtaaatggcaaaatatctctgctaactaaaatgttggtctgtaaggcagaggagagaaatggacagggctatcctggactgcagaattgtggaagatttcattgcacaaaattctcctctgaccaagaagacaagatgagcttaaaagctgaatggtccctgaaaagggaacctggacatgatgatgctgaaaggaaaagcattgaaaatatgaagtgctggcttaacacttaaacctcaattttaaatgtggtttttataagtttgtataacattttcattaaacatgtggcaccttttactgtagcttcatgtttagttgcaaacaggaaagagatattctctgatggtttatttggtgaaggccaactcatcgtagagtcagcttgtactcaccgcattatatgtacaaagtacatgtgacaggaaaggaaaaccaagagaggtttaatccttgtcctactagacccctgtgcttaacctatttatcataatctttttaatgatctgcctagggcgggctcagtttgctaactatcctacaaaagtgagtctcctaccatctcttaatattatcattctaatcctgtgattattctgctccttttagtcgaccattgtccatctcttccatttgagtcttcatatttactctcttaaccatgccaaccaccagtgttactctgggctggtctagaactcagggattcagtctttcatatgttgggattgtaagcgtgagccaccacatatagttaaatttattcatctgttcattttacagttaatgagaatccttctttttgctttaaagtacatgttggttacagaataggatattgtatatgagatactatcatagtccattcaagctgctgtttcaaaaaaaaatgccgtgcactgggtagctcacaaacagtagaaattcacttttcatggttttagatgctgggaattccaaattacagtaatgacaaatttgctatcctgtgaaagatctctttctgatctgtagatggcaccatctagctatttcctcatatggaagaaaggttggatgggcttcctctggcctcgtatagtactacccgtgaggcactacccattcatgaggattctaataacttggtgaggttttagctgctcagaggctccaccttccagcaccatcatcttgaagttaagatttctttctattaagaatttttagggtgttggagagatggctccatgtaagagcacttgtgattttggctcctagctccatatagcagctcacaaccatcaataaccccagtgcagggaattagatgcccttttctgacctctgtggacaccaggcacacatgcagtttacttacaatacatgtagccaaaacattcatatacatataatgaaaatagttataatttttatgggctggagagatagtgcaatggttaagagtactgactactcttccagaaatcctgagtccaatttctagcacctacatggtagctcacagccatttttaatggtatgtgattccctcttctggtgttcatgaagacagagcaccactcatattcataaataaatgaataactcttttttaaaaagttttaggatctggggatatgccttggctaaaggagccttgggtggccctatatttgatgcctagcactgttgaaaagggaggaagatgtatgtagcccagttagtagagtgcttaccgttaccattaggttcaaccttagcacttcataaactgagcataggagcatatacctataatcctaaatggcagcaggaagatcagaagtttaaaggccttcttggctacaggtcaaggcccatctgggccacatgaaaccctgtctcaaaaaggaaaagaggataatggtccaggccatagcagcagactgttacaaaccatcttttctagtcttaaaggagctcattgtatattcattctggattattaactacttaaaaataaagaggaatccaaaggcactataaattgtgcataaagcaagactaagttgtcatctgagccctaatgtgaattaacaaaggccagaagattaatatgctggcccacagagaaaatgtggaagcagttctgacagcagggaggctgtaattgcagatacggctttctttcctgcctgtctctaaggtcgttttgtgtcctatggcttacctgttttttctccattcttctctgtgatcctgttgctggcactctttctctgcccagtatgttgtatttctgttgcttcattgctctttctggttctgcttctcttactcaagagttctccttcccatttccctgcctctcctcttcctgttcatttttagctttgttcctatttttaactctttgaaacttgtatttatggtcacatacacacatatttatacatcctactgcagcacaaggaacctgccagtgtctacccctcatagaaaagtgacttttctacaccttctttatagatcctcagctacgactggggcctcgggagcaactctataatggagttttgttttttttatactgacttaattttattccagagtacttctaaataacagtgccatattatgctggatattttatacttccttggtcttatataggtcttatgtgggtaaccacagttgctatgagttcatgagtacaacatgttatatacaaaggaagtatttcagagcacttgtccccatcttcaggctcttactgccttctcttctgtgatgttccctgaatctttgggctcaggaaaggagattaataagagaataactgactatgaaagagggcagaaagcatgtaagaccttagatgaagctgtcataatctccactactactcattttgattgcttattttataattatggatttcctgtgctcaactcactatttactgtagtaactcttaatattcatgccttttcatttacagtatagatcaggagcatagtattaaaagtattctaaatgttttttacttttggaaagacattttcatcttctgtgaatggtagtttttgaagcttcctagttcttacgatatctagcattgataagtttccaaagttgtggttgaaatttctttctgtaggctacagagagtgaagtaggagatgtagatttaacacgccttccagaaggacctgttgattctgaggatgaagaggaggaggaagaagagattgatagaacagatccactgcagggtcgagatcttgttcgggagtgtcttgaaaaggaacccgcagacaaaactgatgatgatgttggtaagaaatatatacatttgaggccaaccagagctccacagaaaaaccatcttaacacagaggggtggggggagagggagaggagagagagagaagaaataattctgttcacataaacatttttaaccctatatacaaaataatctgttgccacataacatattgtaccaaaacataacttctaaacacaatatacatttattatttcatagtctttgttcgttgggaattcaggaacaacttagctagataatattagcttaaatcttagtcagagtttacctgcaaactccagtcacccaagtcttcactggagtgtgtgaaaatcttaagtccaagatgacgactcatgagacttctggtacaagacctcagttccatggcatggagttttctttgtagcctgcttattcaccctaacaacttaacaatagatctctgatgtgggtagtccagggtgagcaaggtagatagatgccctagtgtcttttgtgactatcattccttctgccataatcattacaccgtgcaaacctgaaagagtatttgtgaagactgtgcctggacattggcatcaagatgtcagatcattgagagccattgttgagacttgctgtgagtgtttataaaataaaaatgttgatttcattttactgatttttatcttgaggttcataagactcactagagtagtacctcaagtccatgaagttatttatttatttatttatttatttatttatttatttatttatttatttatttatttggtttttcgagacagagtttctctgtatagccctggctatcctggaactcactttgtagaccaggctggcctcgaactcagaaatctgcctgtctctgcctcccaagtgctgagatcaaaggcgtcgcgcgccaccaccgcccggctgaagtaatttttaaatcaatttcaaatatatttcatttaccctcatttgtgccaccctcattaatgttaccctcattaaaattataaagctttttgtgtatttcttaatttcttacagttagataatatgtttttaattgaaaaattgaatctaaagatggttaaggaactaagtttactttgagtcagttacatattgctactgttcaattacgatatttttttttaagatttatttattatatgtaagtacactgtagctgtcttcagacactccagaagagggagtcagatctcgttacggatggttgtgagccaccatgtggttgctgggatttgaactcggaacctttgaagagtagtcgggtgctcttacccactgagccatctcaccagcccccatttacgattttatcttggattttttattatcttattgctgttcatattagaagtcaatgttagtgaaaattttaacttttattagcaatggccagtatatttttatatattgtctgccattataaagatagaatattgttaaataaccactgtttagacttgtgctgtaaacaaccgcacagacactacattttatgaattccaaatacctatgagtatataccttctttgtatagctatttttattgaagttcgtttatcttattgcagatgtgtgtgtatatttctcttatttttatctttattacttaatgtgtttttaatcaaaaaatagcctcaaacccataaacatttagtaaaaatagtaaatttttagtaaaactagttaactagttgatttaacaaatcttgagctatacatcactttagttatccctaacttactgactgatgttaccagtagaattaagaaaaagaaaattctagcctaaaagtaatagacaaaagggtttttgcaaatctgttagatcaaagtacagcactaagttgcaccaccaatcaagtgacatctccagctaggcaaatcagatagatgctacagctttgtttgaacctttgtggtttcctgtttctctgggtgttttgaatgatatctttcaatataccagtatatatatgcgacggtaaatatacatacagtttataaatttatatgtgtacacatataacctactaaattaactgggtttttataaaatatttttatttgatagctctattgcctgcatatacatctgtgcatcatatgtgtgcaatgctatggaggtcagatatgggtgtcaggtcctacgttgattaacaagttgaatactgaattaacaaaatttgtatgttaaagtaagcatcattgatctttatactgggatttgtgttttcttacagaacagttacttgagttcatgcaccagctgcctgcctttgcgaacatgaccatgtctgtaaggagagaactctgctccgtcatggtttttgaagtagtagagcaggctggggctgttattcttgaagatgggcaagaggtaggtcagcagattattaaattaatttctctaagcttgtataaattcaagctttttggtttaaattattttgcgtgaatacttggttggggtgattaatttttgaagaggttgtcttgttgtggttattgctttactctttttaaattgctgttttcctggtgctagactttatgtaaaatcaggattcaatcaataattgaaccacttttaatactaaaattaattagactcttttaaagaattcttcattgtcaatttgtgtgcgtgcgtgcgtgcgtgcatacacgtatccgtatgcgtatgcatgagggcaaggtattgatgctgttgcctgcctcctagtggatatgataaagctgtagcatgatggctctcaatttttctaatgctgtgaccctttaatacagttcctcattttgtggtgatgctcaaccataaaattatctcattgacgaagtatatatacttcgtcactgtaattttgctactggtacaaattgtaatgcaaatatctgttttccgatggtctcgggcaacccctgtaagagggtcacaacccacaagttaggaaccactgctgtagtgagactgggaaacactactgtaaggttgctgagaagtgttttaccatttttttttaacatttctgaaatttatttagaaattctctgtattcacagtctctaatctgttctacttactagtgtctctccttagaacggaataaactcaagagttatatcaaaagatattcattacatatttataatagaaataactgaggataccaaactgtggtttaaaaacaagcaatagctaaccaaataaatacataaccatgggataaaagagtagtgtatccttagtagttctttgtgttgcgggggactcaaacccaaactgtccaaacttgtccaagcatactggacaagtgatgacccactgagctgtgtactctgcaagctcacatttttttttaactactagaaattctttcaggggcagatgtcttctccagctttatttgaatgttttgcacatccagtaaataatatacacatccccaggaagttggaggagacagatgaggttgggttttttttaatctttaaagacaagataaggactggagagatagctgagttggtaaagtatttgccaacaagtgtgaggacccgagtttggtccctagaagctgcaacaaaagctagacatgatggcatgcacctgtaaacctagcatcttgctccgtgcaagatccctggggctcattggtcaaccagtccagtctgtttggcaagcctaaggccaacaagaccctttctaaaagaatcacatagatggtatctgcagaaagacagccaaggttgtcctctagcctccaaatgagtatgttcacatatatacatatgtgtacctgcagccacatgtacacaagcaaaaataaaccaagttggacagcacctgaggttggcctcttatcaccacatgcacgcacttgtctacctacatatacaaacacatatactcaagcagaataatctcaatattcaaaagcttaaaataatatacaaatgcagccaataaataaaagctgtttagacagtaggattttaatgagcttttcttttctacgagtttttatgttccctgagtctcgttagcaaaaatgtattgtctggttggacaaggtgcacacctttaatcccagtactaaggaaaacaagcaaatagttctctatgtgttagaggctagcctggactattttagcaagttccaggatacccataactacatagagaacttgtctcaaaaaaccaaacacattaacaaaaaaatgtatcatctgtcaacttcctaccagatatttctgtaagcaggaatatggtggttgggaaaacacacagccccattctctgtagtttatataatctataaattctatctataaatcctactgtattcttataatcagtaacaaaaaaaggactttataaaggtctttttgttacctagttactactcaggatgcatcagaaatgttgaaagtttaatctaatgtggaggaatggctattaaagaataaatgatctttcactaatacacagaagacttttaaaaatacagctgtgggggctggagagatggctcaccagtcaagagcatctactgtacttcttgagtacctgggttcaattcccagcacctacatggcagcttacagctgtctgtaactccagttccaggggacctgacaccctcacatagacccaaatgtgggcaaaacaccagtgtatataaaaacaaataaatcttaaaaaacaataatacagctttgggctgaataggtggcagtttcaggggatccaacagtcatacacatgatacacttaaatccatagaggtaaagcattcatacacataaactaaaataaatctttaaaattagaaatgtgtacatgcatacatgtcatctccccggccaccaatatggctctgtgggtaaaggaacttgccactaagcctaacctctctttcaattcatggtactcacatagcaggagagaaacaattcctactttttatccttcagccttcacacaaacattgtagcaacatgtttcagcacacaccaaaaataaatctccctcacgatttcatataaatgaagaattgtttttattattagcacaaatttataacataatatatatatatagagagagagaatttgttagctgtgtattaaaattcaggctttgctagtttttatcattagaacgattatatgttggacactgttctaagtatttggtctttattaagttggccatctcctttaggagttctgtattacttttaaaaaaacaaaaacaattgtttaggaataaactgaggcctggggacattatataacttggtgaaaatcactgtgctgctcagtggcagggcctggattttaggaatttgtgctcctaatagatggcttagcagttgagagccctgggtcttcttatcggagatagggaacacctctcaattgtctgtaagtccagtttttgggagtatgaagcacttatctggagacctagggcacacatattgtgcatatacatatactcatgcacataaaataaattgtctttaaagtaagaattattctcttaaacactacagtattttgccttagagaaagtggccgattatgaaattcctttggtgactaaaagaagaaagtgaaagaaaccagtagttttgtatagacaagacataggatattgttgaataattactgaataatagagccaggtctcattttacatgtttttttttttattgttgttcaaagttaacttataactatccttttaaaaagattataacacctttcttttcctctatagcttgactcatggtatgtcattttaaatggcactgtagaaattagtcatccagatgggaaaatagaaaatctcttcatgggaaatagttttgggattgtccccacgctggataagcagcacatgcatggagctgtcaggaccaaagtcgatgattgtcaggtacgcctgctctgctcggtgctctctctccttagtgatgaaaatggcggagctgcttttctctctcttgctcaaaattaaacagcattagttgagaattaggattttctatagcctgcagttaacaagagaaagtagattttatatttttctcaaattttgttgacttgagcaaagtataaatttttaagagaatgtttcaaataaatgttggtttgtttgagcattcaaactcttattatccagttcaggctgttttcaaaaaaggaaggaaataggaacttgtgagttgtttgtttctaacttactcctgcttcatgatttctttgcatagtgtctgtttgagagaagtggatgttcacttctccttttagagcagaattcagaagattccactttggtctctgtgtgaattgtttaccttgatttttgtttagagttaacaaaattgaatgagaaagagcttatgccgcttgatttcttgccgttgtgctctgccttggtgcatagtgatgtgtttatgtactataggttccttaactgtccccatgttattcttggacagtttgtctgcatagctcaacaagactattggagaattttaaatcatgtggaaaaaaatactcacaaagttgaggaagagggagagattgtcatggtacatgagcaccgtgagctagaccggagcggaaccaggaaaggacacattgtaatcaaggtgggtgtttttactttttgttctagaaactgcattcagatctttcatcttgctttaaaaataggctttagaccacttttatgagtaatgtaaaattcttcactagcttgttgatgtctaattgtttcttacacatctgaatgataaggggtaattattgccatttagtatccaaattgatataatattattttagattatactgatcaaatcttatttttttacatatgtaagaccttgatagtgggtgttagcaagaagaaagcaagcaattttagtggggagacaggaaaaggaaatttaaagactagccacaaacacacagagtccacagtgaaggtgcagagctcttgttagcttgaaatgagctgtggcttctctgaacctttctttaaattgaaaacggaagagatacaggaagtgaagttatgactgagtgaggaaaatctggagttttagtattattacactcaacacagcaatctctgtatttccttctctgtatctccaatattctttgtcattccagtctctatgaagaccccctagatataaagtaagtcaagtataattgaaactaaaatacacgtttctctttttaagctagccttatttgcaaaatatgtcattattaattggcagatggacaacttaatagcatagagaggaaatacaagtgatgccatgtcagttttttcctgggaattgaattcttagaactgtctcttagtataagttttgtgtgcagaaaaggtgagtatggctgggtatggtggttacacacctgaatcattcccacactaagatagaagcaagagaatcctgagtccaagagtagcttcagctgtataaagcaagttcaaggccatactcagctatatgaaattgtcccccccacccccaaaaaaagagaaaagaaaggaaaacataaatagaatacatagactaattcatattatcattttgtctttggcaaagacccctgtattttaataatttaaaacttatagaaaagtttaagaaataaagtagggagatggctcagtttagttagggcttatcagacaaatgcaaatatagggacctgagtctgtcagaactcatataaaaaaaaaatctgggcacattgatgtgtgcctgtaattggagcagtggggaagcagaggtgaccagccagccagctgaattcatgagttaggggtttgggctgagactctgtcttaaaacatagtggagaatatttgagtaagatatccaaaattgacctttggcccacacatacccatgtacacatgaacaataagaagtttcaagaataatacagacagctctaagttgcatcggccccttttacatcagtcttcttttgaattgtttgagatagtttacaaatacaatgtctcaccattcctaaagcaaaagttttcttacataaacaccatagagttctccaataatggaaggacacattgttaagataatacagtcaatttgaggtccctagtaaattctcactagtggttccagtaatttatttcttgtctggattctcatctaagaacgtagttgtatttcattgttgtgccactttggaccactccagttgcctgatcttcttttgttattcatatccccagcagacttaaagaatcttatatcctgtcacatttacccatggccaaactacactcatgttttccataaaggaatatcactatgattaacactgctctgtgtgtttggtgcagtgttgacactttcctctagggaagctaatatgatgacctacgtccatatgcgaggatctttttttctgtgacgtcaccatttatgacacttcataattgatgagtatctgatgaagagatgttctgagatgactcagcatactgcctctagtttgtggatagtaacaactaagtcccacctgttttttattattattttattttttattattcctgttgaaaacactgttttactaatcctatactttctctgtcattctttatgtttgatatggccttggtgtcgcactcccttgccatcagtattatccagatgctatacaggttgactcatttgtattcttctgaaatgccctcatcattctttgacaatcagtaaggattatcatgaacttcttttttgttcctactctggaatcagccatttctccagaaagttcttgatctttccagtagagaatagcatttataaaccaggatctggaaatttactatattgtatatttgtggcccctcatgagtcagagctagaaaaacaggtatttatgttatcaatgtacttctacagctgtctctgtttgcattctgcaaccatgagattatatgctatttaacaggtctaaaactatgctacaggcttagtctaatgttttatttacatatgtatttattttcttgcttatttgctgattttaaccagtctctaccttgctagaataacagtgccagccatgtcttatgcctttctccaagtgaaaagcatccagagtgtgattctctccaagtgtcaaacttcttggttgttagggtagacattggagacatactttcccataataatgtcctcaaatttttgaatgtatagcccagactctgtaggaacttttatctaccagtttagacaaacagaatagtgttcttcctttaaagttgaccagttaccacactcactgtgtataccctaagaccacatataagtttcctagaccatgattggcataaataacaaacccattttgataatcttagacttagtatttttgagagtaagacacgcagaggagtaacttatagtctctatgccatacgttatttatatgacatctttcttactcctgaataccttcagggaatgtgatttatataccttgttaacattgagtgcccttggggaataaaaactctgagcattgtcagaattaatgtatgtttactatagagatgttgggattatttgtatggttgtaacaaattagagtttgaacttgagggccatcattagattatttaattttatattagtgttttgcttgtgtgtgtgtgtctatgcatcatatatgtgtcatctacagagatcagaaaagggtattgaatcccctgaaattggaattagagatggtgagctaccatgtgagtgctaggaaccaagccaagtgctcttcatcactgcatcatctctccagccccacagttgctttctatatctaactgaatatttgttttctttttacgtatattctgtttacccccttttgtaaaggtaacagagcaggattgcaaaggcagtatagttggtaaagtgcttaccttgcaaacatgatgaatttgatcctcagaacttaggaggttggagagatgggtcagttggtaaagtgtttgctgtgcaagtgcaagactcttacttccgttttcttttaaaaggctagtatgatgacaagcaactgtaattcttacattgaggggggcaaaaacaagggtccctggggcttactagccagtttgtaaaccccaacaaaattttttctccaaaacaaaagtgtgtgtgtgtgtgtgtgtgtgtgtgtgtgtgtgtgtgtgtgtgtgtatacatacatacagacatatagtaaagagcatttgaggaagacactgatgtaattctctggcctaagcctcaccctgcaaacccatgatggctcatgcttgtaagactcccaggccagtgagactcttacctcaaaaaataaaggaaagttcttgaggaacaatactcagggttgtcctctggcctccacatgacacatacaccaaagaaatgattaattagaagacctgcaaagtctaataaatttttaacattgattcagaaactcaataggaaatgtgtgtgtgagtgtgtatgtgtgtgtgtaagtgtgtgtgtgtgcacacacacacacatgcactcacatgcatatgtgaattttgaggtagacaagcatttaaaatcctgaatgtacaaacaatacaggatttatttagtcatttcacatacagcaaagcaggaagactagaagagtaaatacttgtatattatgcctgtagcctgggatagaagaattaatttggatttaaagtggaagaaagcttacttgcttgctttcttatttctgtttgtttcctttgccttgggcagtcattacatgccatattgtagcagaagtagtagtaacagcccatacaaggaataagtcagtacatttcctaggtcctatgatggtgagataccagtagaaagtacagctgaacacatgctattggggacttacccctctaccattatctcaactctaagcctctggtcgctactaaattacaatctaaagtctacataaggagaatgatgggaaataatgtgacaccttgagttttgttttttcttaatctttcctttcctttgatttttaggcaacacctgagcgtctcatcatgcatttgatagaagaacattctattgtggacccaacatacatagaagatttcctcttaacttacaggacatttcttgaaactcctttggatgttgggatcaagcttttggaatggtttaagattgacaacctaagggataaggttggtttataaatataaaacaactaactttaacctttaaattttattaaggacacttttgcacttaatagataaagtggaggttttgttgtttttgtggaaaaaataagtttacctaaataatttagtgagttggtgtagatatgtgtttggtcattttactaacgaaagagccttgagaagaaaagtggatctaagccacagaaatcagaaactgaggtaagacagtgatacagctagttataaactcatgaaccatagtagtagtttgtgcagatggaccaagcatgaagctggttagtgagttttaagtaatattccacaaataaacttttcaagaagatgagttgtttgtaagtctcaggataagaccatccaagcttttctgagttagagactctataatcatctaaaaagtttgtcagcacttagtttctttcccataatgtatgggaaatgtgtctttgggttatttttttttccactgagcattgtttgctattttttattgatgactttagcctattttatgggacatctatacatttaatggaaagacaactcatcatattgcttggaaataaattgttttcagaaagtaaaagtggggtcataatttcctggtatgccctcctgaattgcatgttagagataataactcatatgtgagaaaactgtgaatgttattatttaggagactaaactgtccaaaactaaagcctttcctaaccccttactaccacccatgtttcagaattgggtacaagtacattagccctggagaaaataaaggtgtacttatgaaaagaacgaaaagaaaacattatttagaaatagctagatatatttatgtaaaagtataaattggaccctttcctacaccatatacaaaaatccattcaaaagagatcatcagcgacataaacaaaggaaccaacattagtagctggatgaggacacacatgcctacagttcactacccagctgatgtaagcccagtgttgcaggtttgagaccagcagtatgactcagtgggtaaagatacgtggtgcacaatccaaacagctccacaacacacatacaggtgaaaagggagaaccagctccacagagttgtcctctgaccttaatacgtaccacagcacatgtaccccacacacggatcatgaacatacacagtagtgataattgtaaacatttttaaaaaccaaaactataatgcccttagactaattgactttatttatgcagatatagcacccaaagcacaagcaaaaagaaaaaagaccagataagcagaacttccgatattaaaaacttttttccgtatcaaaaagctctatcaagacatctaagatagggagatggctcagtgatgaaaacaatttgctggacaaggatgaggatgggagtctggatccccagaacccatacaaatgccaggtagttaagtattacagccaacttaaaacctaagcctcaaaagctggagatggggcctcccagttcaagctagcttgcaagactagtcatatcagcaagagctgggtttgattgagagaccctgacttagtgaataaggaagaaaagtgatagatagaagatgattcccaacatcaacctccaacctgcacatctataccccgtacacataggtgaaaatggaacaggcaaaaaattgcataaaagaacatacaaattataaatcacagatgtgataaggacctactaaccagaataaagaactctttaaactgaaggacagaaagacaagcaacatgactgaaaaatgaacaaatgactggaataaatacctctctgaagaagattcataaatggttcacaagcctatgaagatgtttattctcattgcacatatgaagtgcactcaaaaccaaatgagtgtaccacttttcacctactaagatggcttttttaataggagaaagtgaaaactcttggctataaggactagacacatacacagtattgaagatggtaatataaactgttgtactgtagaaaacaatttagcagttctctaaaagactgaacacagagcagacacataacccaaaaattcttctgctaggtatgtacctaaagaaagaaagtgggtttgcaagcaaaaacttagacacaatgttcattgcacgattgataatagttagaaagtggcaacaacccaaaatcatcagggataaataaatcatgtatggcagtaaaataaatatgcatggaattgaagcgctaagtgaaaaaaagtcataaatgactacatgttacatgagtctatgtatatgaaatatctgaagtaggaaaaatccacagagacaggaaagcatatcagcattaactttcaggggcaaaagggtacagaatgagaccacactaattaatgaatatggattcttcttttgaagtaataaagcagtggttctcagccatcctagtactgggaccctttagtacagttcttcatgttgtggtggccccaaccatcacattatttcacattatacatatatccgtaactgtcattttgctgcacttaagaatcgtaatgtaaatgtttttggaggtagagagttgccaaaggggccatgacctacgagttgagaacagctgtgataaagaatgttctagagcttcatataatgagtgtgtgacattgttggatatactaaatgccagtgatgtgtgtgctttagactgcttaaaatggtgacattatgaatattctgtcacaaattttagagtgtgaatcattacggactttattaggcgcagtattcaaatccacttatatttgttagctaaaactgtgtgtcagcaggtccatgtaccacaggagcatcctcttgctccctgcattatattttgagacaaggtctcaagctggactagaagccaccagctggcagctccttggattttcctatctccatctctcagcactggactttcaggtgtgtgccaccacattcacacatctgaatttagatccttatgcttgcacagcaagcactttacacactgagccctctcttctagccccgtcttccttgaattcttttttttttttttatttaacctatggaacaaagtaaacttaacattttgcaaacttgactatttagtgtcaagtttgagtatttagtgactttttttagatatgtttttcttcaaaattttggtcaagtacatttttaacacttttagtgtttgaaatgactgcctgcacttgtgtttaatacactgtgaaatacacatcttagtttgtgtcttcttgctgaaccaaaggaaacatgctgagattaaaccgcctctcttgttagaacaaaagaagctcaagagtagccagaagataatgcataaccatgtgctttctcctgtttccgcaggtgacacggattgtactcttatgggtaaataatcattttaatgattttgaaggtgatcctgctatgactcaatttctagaagaatttgaaagaaatttggaagatacagtaaggctcaaaagaatttgtttttataattcagcattctccctacccctcagcaagaacagcaactcagaacacgttctgtcttctcccgtgtctgttgtagcatgagaatgtctcaccaaaataaaatttaaaaaatgttccttttatgctcattattgttttggaacttgcctcttgttacagtgttcacttggacaggttaccaaagctttatgccttagatctctgtagaaaatggtaatcgccaatttggggagattgtgaggactacagtgaggtaaaagctgaaagcagactgccacagagaaagcactcaggagtgtagttcccagagcaagtgggttgagcacagaaggaacagagtggcagctctggtccctttttaccctcagctcctgcagactttcctgtagcatgtctgctctgtgcggaataggaagcatgggcagagattggggaacttgactgatggaccatagaggcacactaacatctgtagctcttacagtgccgatgcgtggctatttaaaggacactggaaagacgttggaaatcaggttgagtcatggattgcccccatccctattcattgaaatctccctctcaaagatactatgtataagtgtagaatttgatcatgatcactgccctggaagtaaaaactatagctttttattagagccatagcatgttcacaaacacattacattacctgtttgagaatcattgaatattattaaactagggatagaacttcaagttagaaagttactgagtttaaaaaagagttacatattttttgaagaggtagaaacttggatgtgtctgaatattaggtaataggaagttttttttaaatagaattttagaagatcctgttttgtataacagccaggaggtatacaagataatacactaaactcagaagattcgggtaacttttcattatcaaaaagtcttttaaaaccctgttgaaatgttattgaatgctctagggtgggagtactctctcatcttgtctacctcactcacaagttctgtagtttgtaggtttgggttctaatgctaaccattgaagaatattttaaagcctgtaagaataggtacatacatgtatactttcgtcttttctgcttcatagaaaatgaatggtcacctcaggttattgaatattgcctgtgctgcaaaggctaagtggaggcaagttgtactgcagaaggcgtcccgtgagtccccgctgcacttctgccttactgggggcagtgagaagggatttggagtctttgttgaagaagtagaatctggtagcaaagctgctgacgcaggactgaaaaggggtgatcaggtaagtaaataatcccacacttaaataagaacattgataaataatctgttacttttgtctcttttggggagggtagttttgagagtaagagagtgtgtctgtatcagagacaacttagagtgttttccttaggagctgcctactttgtttttccttgacagcttcagtggcctggaacttaccgattggctagggtatctgctcagcaagctccagggatccacatgtctctaccttcccagcaccaggaaatcaggtcctcacttttccaaccaagctatctctccatcccgagttttaatgtgtaaatagggtttattttcagaatatttatcatatattcattgcttttgatgggaaattttatagtcatatggttgaaaccatgtattctacagggctcagtcagtataaccacctttgaatggccctccctatttcctaaggattatgaaatttatccttggcaagtttagaacattccagaaagatgttcatgaattagcacccttacaagtgtgatggaatagatgcttcatagtgcttccagtgtaagtgactgaagattaagtgatatcaaattaactaatgtccatatagtcccacagcttcatttataagcagagtgaactagatgaaaaaacaggaaaaactgagatatgtgaagaattgggtgatagctcactggtttgtttgcattttggttgttgttgttgttctttttcgtttttggtttctaggtagggtctcactatgtccttgatatcaatatatagtagaccaggctgccctttaacacacagagctcctctgcctccgtactgggcatgtgccagtgtaatgtgccattatacctggttggcttactctttttagggattaagtagctattgtacaacctaattaataatgtaatatactgcatcttatgtataaagtgtaacacccaagctcacttcagtaattttaattttattaatataaacaagaaagtctgagaacctgttctgatttttttttttttggttgttttattttcaagtactggaaatcagatcacagctttccaatgtgagacaaacactttacgactaacttacatctttgtcccaggaatccgtattttttttaaaaactctgtagatgattttcacgtacaccagagtcattttcttgctgatcttcagttcatatacagagtggccagcatttggcaatgtctaaaaatagacatgtgccctctttcattttgtttctgttaggactttgttgttgtttggtttagtttgttgatagtgtgctaggtgagcacttccctgtattttcaacccctaaaaatattgtttgggtatcaaaacctagagactgttgctggcgcatagtgaatagaggccactagacagcctacactgccctgaatgtgggaaactggtgggtggggtatggggaaaccgtggtaggccaggcgtagtaatgtacacctttagtcccagcacgtgaatgcaaaagcagatggacctgagttcaggccagccagggctaatcacacagtaagactgtctgggtgggcgtgggggaatagtaataatcctttgatttctttaagggagttttttaatctgtccctttcctcagtctactcattaaaaatatctaacaaccagtattggagaattagtatatttattatgatttttaaagtattttatcataaaacatttaaagatatcatttctcacagtaggtgggaagacaatgaaatccaaaatttatattcccaacatgaaatatgtcctggttttgcttcttccattctttcccatgatcacctctagtgtgtctagatcattcagctctattatttctcattttacagacatatctgtatatatttgaagatgtcatgtttaatgtgttacaaaggtccatggtaacagtgattttactcctaagaacattgaagttgcagaaaaacatcctattatattgttgcccagtggaagtcagaagctggccttttttcctactgttgactcatacacatctttattctttgtcctgagattcagcattgttgagaattgttacaatggagatatcgttagtgccagggcgttttggtatatagatatgggttatttgggtttgctttgttttgtttgctacagagtctcacagtgtaaccctggctgacctggaactcactctttagaccaggctggcctcaaactcagagatctacctgtctcttcctctcgaacactggaattaaaggtgttaggcagtgggcctaacgtgcctttttagaattctgacttttgcttctattgatgtgtcttttcctaatatatggtttgtattctcttctactttgggaatttctgtgtcacttctgaagtctgtcctttgctgtttgtttgctgaagaatttctgctcattaagatttttatctttttctttgccctggggatttgcttcccccacccacccacctgtccatccatccatccatccatccagtaaacaatttgtgtggtaatggggtataaccaaattaaagaatccttctgtgaagaagcagtttctcacctgaaggaaaaatatcacggtagtgttgcttttggctggctgcttgattgtttttattgaaaaaaagaaaaaaaataggaaatatttagaatcctaatctgtttttcccccttaagacagagcctgactatttagctctgtactttcaatcctcctgccttagtattgggattataggcatgcagttatattcaatatgagcatgctgcttttaaattaattgaattaatacattgggatgcactaaataccactttagactatttgattataatctgcataaacatacataagtagtgtctttcgaactagacatgattaaattttttctttacttataaattatcatatatgtatttgtgtgtgttctcattcacacacacaagtcatgatgtatgtgtggatgcctgagaagtcaattctctcttttcaccgtgtggatcctggggatcaaattcaagcttggtggcaagcacctttaaccactcagccatctccccagtccctgttttatttttcccctccccctctttttttaggtttattttatgtgtatgtataagtttttgtgtgaatgcctgtgaattgtatgcttgcccggagccagcagagatcagaacaaagtgttggagttatggatgagtgtgaggcaccgtgggcgtggaaactgaacctgcattttctgtaagaacagttcttgctctggactgctaggccagatcctttaggatcctaaagaaaataaccttttaaaatacatatagtgcaagatttagaaattaagcagtacagggggaaatgatagtccagtttctgatcattattcacatatggtgtgatttattcaagttctagttcagtttttctactctgaagctcttaagattataaatgctactaataattatttttgtcttaatttgtatttctaaaatattttcaaggtaatggaagtcaatggacaaaactttgagaatattacacttgctaaagcccttgaaattttgagaaataatactcatcttgcacttactgtgaagaccaacatttttggtaagttttgttgtaaaagctactgggggtaaggttttgttttattttgtgtaatagaaaaattaaaaggcatttcagtgaggtagatgatataaaatataaactttgttgtgaaactgctaagattattaggattttataatctataatttttatattatctaaattccatggaaagagtagtaatcctaaggaaatggagatacagcttcagtcctgtgtaaagtatctcttgagttcctgttgtgtactgtgcaggacagagtacaataataaaacctaaataataaaaccttaataaagcttagacgtcataagcaggatttttctacttctgacctacaaacctagctttctacagtgaatcaaatgtcagattagttgtttcatcaaataaattgagtgaaacattgaaatatataaatgagatttctaaacagcatgtccttcctttctatgtagaagcatttatagtaactacactgtgttcttcagttctgtggtatgaggggctgggcctagggctgctcaagtgccttatagctgaactacatctgtaccatacattgtttgtttttcgcattgttcttgtaatttttaagattcgttgtcatttactttagacatttttatgatttattatcatttgctttagactctattgaattttggctaaaatcatgagaatgaaagtcaaaaatcgagaatagcaacttaaaaaccaaagaccactcgggagtttttacaagacagggaaagaaaatccctttaggttggttagattgcaatcaaaataacagtagagtcatagtaatatgccttttagatggaaatggagtgcttggggttttagggcaaactgaaatgtctgtcttggtgctgaagagatggctcattggttaaaagcacttgctagtcttccagaggacctgagttctgtttccatcacccacagcagataatatccatctgcaactgcaggttcaaggaatctgatgccctcttctgaactctgtaggttcatgcacacacatgtcagacgctcacatgtgcacataagtaaaaactaaatctcatttttactgtcattttcacatgctttcgtctcatcttgctgaagaccctacaagatgggaaaaaaatatctgtcagttcttctaacagaatataaagatctcaaaaagctagtatgatggaggcaggagaattaggactccaaggctagcctgagatacgtaagaccctatctccaaaatataagacaagtaagaaggaaggaaagacttggaggctgaagcggaattggaaggtcaaggcctgactgagatatacaatgaaatgctgtcttaaaaaaaaaaatgaatgaaaaagtaatcttatatttttttaatgagcaaattatctaaaaagaggaagcagacatggtcaacaagtatttgagaaagtactcaatattattaaccttcagaaaactgtaaacctcgaccacagtcatcttctgtcttaagtgactttaaacaaagaaggaaagaatagagcagatgttgatgataaggctgtgtgggaaaggcactcttacacattttttttttttttttttttttttggttttttgagacagggtttttctgtgtagcccaggctatcctggagctcactctgtagaccaggctggcctcgaactcagaaattcacctgcctctgcctcccaagtgctgggattaaaggcgtgtgccgccactgcccgactctcttacacgcttggtggctgcgtagcttagcatgactgcggtggagaagacaagttcctcatgcagctaaacagtgcttgtgcacgcctccttagtgcacagccccaagtcatgacgtcagaaaatctcagcaatgcctgcgtacggctgtcctcacaaatgactaaaatgaggagtcagcctgaggcccattaataggtaaaagggtgatatgtaatattcaggagtattaagccacaacagaagtcgaatcctgacacctggccaaagtggatggaactggaagacattacgctaaactactcagtctggcacacaaagaccagtgtgggatgttctctcctctgtggcagcaagagcagcgttgaccagaaatcaggctaaagattactagagactaagaaagggatgggggagagtgcaaacatggacaaatggtggttggggatatggtgataatgaatgttacatcagtgcatagcataatatcctgatctccataaatatgtacaggcatttttttttttttttatcaaccccagtggagtgacacatgcatgtaatcccagcacttgggaggctgaggcaggaaaactgagagttcaacaagccaggctgtaaaacaaaatcctgtgtcaaaacaaaagaaaagtaagagaggaaagagaagtgaaggaaggaaaagaacaaagaaaagcagcccctgggccaggctatagctcagtcacagcagagctagctgtatgagactaggcagtctcattgtgtagtacatgattttcacacatgctagcagcctacctgtttcctctcagtttttccccagtgacatcatcttatcactttggggatcgagcagatgattttaaaatgtgtattagcctgagaaagtgacgattgttatccttaaaatgtgttggtataaaactttttgacaagagccgggcatggtggcgcacgcctttaatcccagcactcgggaggcagaggcaggcggatttctgagttccaggacagccagggctacacagagaaaccctgtctaaaaaaaacactttttgatgaagagatggaaaatgatgagtttgtttatttccacagtgttcaaagaattgctcagtaggactgaacaagagaaatctggtgttcctcatattcccaaaattgctgaaaaaaaaagtaatcgccattcaattcaagatgtcccaggggatatggagcaggcaccacaggagaaaggaaataagaaaattaaagcaaataccgtttcaggtggaagaaacaaaatcaggaaaattttggataaaacacgatttagtatcttgcctccaaaactatttaggtaggtaataccaatataccatgtggggattttaatgtttattgtaggaaagagagctgagtcatatttgtttttattcatcataaaatcttcaaacacatgagtaaaatcaaaattctccacattatctctgtagacttagcactgtcgggtggcttctagtgttgtgaatgctagagaagattgtttcatgtgatttgtttttctatcttgggtccagtttcaatttactgaatctgtaaatttggacatcttaaatcttgggatacattcattgctagtaatgtttttggttttgaatatttttattgctggtattatttactttctcctgaattctaatagtgaagtttttgatatttgggtttttagagatcatctttctgtatgttttgtcaggaactaaagagcttctgccatagccttcagacttctgggcatatattcaccatgcccagtttatacctattttttgcttcacacatgagatatctccaaaggtctttgtatgcaaatggaagtctgtaaaatgattgttgaatcattgtgctgaagtgtcatggttaagaataactccaatttctaagccatttacaaaatactacgcaagtacagtacataaagcaaaggtggtattcagtacttggtgaatcaattaagacagtgaattcgtcactaacaaaaagatgtatccaggaaaaacacatatgcagtcttctgttttcatcagtattaaaaaaaatcacaagctagaaaaatggctcagtaggtagagtcctggccactcaggcatgctgacctaagttcagaccccacacccacattataataagctaggtacacgagctagtacctgtaatttcagctgggggggggggcaaggatgagcggatccctgagacttcctagccatccagtcttgtagcattggtaagctctgcttccagagattttctgtcacctgtctgaaaaaaataaaatgtggacattaaggaagagagctgatgccacccactggccccctacacacatggacacacacaagcacatgtatgtccccatcacacacatctatctcagagataaggaaatattctttacaagttcttacttctagctggggagacaaattttctcttcaattaattaattaattaacttgagacttaaatgtgatggctctattctaattccgctctagagctcattgctcattcatttctgagtcactgctttcattgaggtgggaaggttataaaaaccacaactttaaaagagccaaaatatttacagttgtacatatcagcaacctctgacaccagtagaggctgggtgaagagactgttagagggatagcctacactaaaaggttgaggagtgtttgaagtcactgtggaaaaggagaagaacctaggggccagaaagcagaaaatagttcacgtggagcgttccttagcaggtaatttcttcagatctgtttccagaaaccctgatggcttggtgtggagtatgtacatcattgcaactggtggtatagttatgtcatgtattatctaaaactagagaatgttacaattgtggctcattatagaccctttctgatcagctaaaccaatggcattatgcatattctttggagagtggaaataggttactaggcatggacactaggttcatagcaggaaacagaaattgctgtcaccaggagcagccagttgagtatttcccatatgataattttgaattggtaccaaggaaaaaagatctactagaaatgggtttgtttaaattcaggatgtatttttattgaattttttctttgttgagttttttgctttgtgctacacctctcttgtatgtatgcagtagaatatgtcaatcatttcagtcactaaaagcctaaaagataagattcctacagatttctgaggccagtttgtgagaattagtttttcatttttatctgttaaactagctgctcagtatttttgagaatgtattattttgacaccattttaaatgaatttggataagtttttcttgcagttcttggggggtcttccccatgtaaggcaagtaatctgccattgaaccagattactagttcttggcttttttttttttttttttgaaacagggtcttcctaagtagttgcagctggcattgaattcactgtgtagccatagctggtttcaaactctttaaagggctgaactcttgcttctacttcttcccaagagctagaagcacaggtatgcgtcacccacagcaagtaaatgatttttcttctttcattttttttttcattttgcaaagactgcaaataggaaatggaataagactataaacacccaaagtcttctcccagtgatgaacttcctctagcaaggctacactgtccaagcttccctacatagcaccaccaacttggaaacaagtgttcaaatatttgaatctataggggacatactcattcaaaccactacagagattcaccctttcagacaaactcctgagaattatttataagggaaaaacaacactgtgatatcagtagataataggcagagaacatgagttcggatgatacatatagatgtttatccaagggtacacaccctttctatagacctcgtcatgatggtgatcttgatgatcatcaccatgatggtgtcctcaagctcctgtgaccaaataagtgatcctcctgcttcagcctcacaagagctagaaatacgccacaagtccaagtatgagtttgtttagctaaatggtatgttagacgtgaaagtacaagaaggacaaatgttcagatgtctgtttgggttttgtttttgtctttgtttttgttttttataaggcacaagtaagttttccccttttttcccgtgttatcttccaactttcctactataaaatatttcaattcttttcattgaaattaaaaattaagtaattttgccaggtggtagtggtacacacacacacctttaatcccagcattcacaaggcagaaacaggcagatctctgagttcgaggccagcctggtctagagtgggttctaggacagccaggactagacagataaacccactctcaagaaaccaaaataaaatattaattttaattctgtaatttttgagtatctcctatgtgccaaaactccttagctgaagcatggaagacagatggtacttctcccacataccctcttaagaacagggcagcttttacagtattggtgtgagcgggaagaaaagaatgttttcttttttcttaatgtgtctactttagattaaagtagacaattcttaaatctcaaacaattatgtacttttttgtgtgggtggtttgttttttgtttttttttttccgagacagggtttctctgtgtagccctggctgttctggaactcactctgtagaccaggctggcctcagaaatccgcctgcctctgcctctgcctcccaagtgctgggattaaaggtgtgcaccaccactgcccggccaattatgtacttttaaagtggaaaatagtccttaaaattaaaatgaaggctggagagatggctcagagattaagagcaccaattgttcttccagaggtcctgagttaattcctagcaaccacacggtggctcacaaccatctgtaatgagatctgatgccctcttctggtatgctggtgtacatgcagatagagcgctcatatacatacataaaataaataaatatttaaaattctttaaaatcaaaatgaaaatgatgatctggatacatctgtaaattatgacataaaattacggttttcattaacctgagactatttcacagttcaagaaatcaaatttcccttttaaaaaaaaaatcactcagctttaattctttctttactcacagttgcccagctaacatcactgtatcttcctagaaacaccatgctttgttctgtgcatcaagaactatttttctctccaaatacgagtatttttttgtttgcttttaatgttggaattattttgtggcctctttggtttcataatgaaactaatacttttatttcaagcatattaaatgttagggaactaattattgaggaatttttcaaaaatatcttgtttctgttactgcatcacctctcaggagactgttttggtaagaaatgacatgattattttcaaataggcttatcagttcaactttaagcatggatttttttgcaaattaattacttcattcctgtcatagcttgaattgtgcatgacagagttttcatgcctacatgcttacaccctaattgccatgaatttatagcctacttaataatgagtatagctagatagcattgtgtgtgttgattattaaaaagcagaatcaatgttaagtggcacgttaagtgatagcaaataataagaacttttaataatccgtggactttacctctatagtgaattgcttttaacaaaataatctgacctagggctgggaacataacttaatagacagagtgcttgcccaacatctgaaaggctttgtccttgatcccaagcaccttagaataccaacactttggaggtggctgcaagaggatcaggcatgcaaggtcattcccgatatatggaatgttgaagggcaaggctatatgagaccctgtgcaaaaagcaattctacttttagtttattttgttagttgagagtagatcatgtctttaaagatttgtctccttggatttagtgacctgaccttatggatcaaaaaattggtgtgtttgtttccagaagtcaactagagaaagacgtactattcaaaaatagatctttacactttttgtgatttaaatactcagcagcaattcttttctcctcttaactaatcttaaaatgtttaattgtgacagcagcaaccaacttgtagagagctagtttagggtaagcaagaattgctcaccaaacaaagcctttcttttcataagagaaaattgatgtttctccttgaaggtaaatgttatttgtatcagttgcattgttgtgcctctacttctcagtgtcaagttaaagtaaatgaccctcttctgtgggtttgaattgttcgtttggtaaaaggacttgactcccttcataaagacaaaagtactacttttcatctagttgagctcacacagtctttgtagtagcccttcagccagtggccagctagagaaggaatccatccaagccaaccttatcagtagtacgtctgcagtcgcagtaacttctttccatgccacaccttcatgccttcctgactgtgcaggcctctcttgtctggccgtccttctgatcttactaataactgtccattattctccatcttgcttcatttcatagtctgcctatatcccatattttgccttaatatattctaaatatattccatatcactcatcttttaggttgtagtttaatcttttccataataataggtaagtgctcggtgatgccgctatataacaaaaacaaaacataaggctgtgctgagtaaaatttagatgggaatagatactaaggaaaacatttcaacactggccagtttagggaaagaacgcttacttggtcatcggtgatcttaaaattctatacaacagttttactttataatttaactaatatttggaaaacacacaaagtttaactgaaagtgtttatatttttccttacagtggctttagagtaacctgtgtgacagttctgaatattttaaaggaagagtatcttgtcctagataatggggttttagttaatatgtggttttgaaaccttaaaagagaactaactgttactgacttaaaatatcttgtgattatcatgtgcttggaggggacacttcctgtggtgtggccatgaatagcttcataaatatatttgaaatttgagactagcaaattttaagcagtccctaaactttcagtttttctgtactaaaatcagaggaagcaaatttgttatttgtgatatagtagaattacttaatttcattttaatgtaaatttcaaaaacatttcattgctgtctctttattataagcaccatttttgtttactgagatgttttaatctaactgatgttttaatcatcacactgaattgattttgttattgttgattaagcctttgtacataggaagtcaaattgtttgctatgtcagtaccttcaaatacttgaaagtaatatatgcctttcttttgaagtgacggaggcctgagtcaatcacaagatgacagcattgtgggaaccaggcactgtaggcacagcctggctataatgccaattcccggaacactttcatccagcagcccagatctcttacagcctaccactagcatgttggacttttccaatccttcaggtaatgttcccatgtaactcatacgactcaataacttgagccttgtacaacaaatactgggttaaactatagtttttacctctgtttttttacttcatgcaaagagctagtgggaaaattgtctcaaaaaaaaaaaaaaaaaaaaaaacctatgcagaagtggtttccttcttcagaattgaaacttaacaataaaagagtctcagtggtatttttcaaaaattgctgagagatggaatgaaaacagactgtgaaaagaattaatgcaaattgtcttcatacctctaaatattaaaacgtcttagtaattttcttaggagcactgatttttttttccctcagcatgtgatgctaaagttgtttttgtttatttgtttgtttgttttgttgattcggggttggtcaagagctgttcccagagtatagcattgttttcattgctaatgattttcaggatggaacatcaagttgctttctacatgtattggtgcccagaggcataaaatgtcacataactgtatgatctaaaatttcattataaagaaatgattatatacccatcacttgaaaagatgtgaaatgttttttcaagaaaagacaaaattaaacctgagtaagtaattgaatccaagctagagatggggaaaaggattcctcggagtgtttgtgattcaactgaggtttcagttgtgatgcgcagaggaagggagctcattcacatacaggtcagtgccaggaagcacatacagggtgttagtacagtgtgtctcttcctacagagacttaaatacagacagactcttaacacagtagaaaacagttactgaagactgtgctgtgcactatttcttgtggtttttataacaacctaaaactccaggctttaacaatacaagtgaaagtagttgtatacattgttctcttctgttcccaactgaggccagagtcatgacactcgcaaagctgatgcttgctgctgtacgtctgtctttctggaggactgccaaatgtagagcaaacgttttagggaatcataactttgcttaagttctagcagttgctgtattagtgaagttttgtcatcatacagaaatcacgaataaatgcaaaactagttgctagtacataagatgaaatatttgcttcagaaagagtgagcactaaagtgtcacagaggcaggagaacagcaggctgggttcatttctgtgccaggttgaggtgtttcagggatgaatcttctctctagctacctgttgacctgttgcttcgctgtttcttgaaagtggcatgtgctttgagactcctgaagattttctccttatgtacagtgagcttgtttcttactcttccgtgttactctctagtgcccagatccctctgctgaaagcaacacattgtcctgtcttcctatgtccgtgttgtagaatcaaaatctgttcctctgtgtgtatgtggtctacagtggtatatttcttacactccatagaatattcacaatcttaaatatgcatgttttttactaaggcgattatttagaaagggcacatggttttatgggtttattgatttttatggctgtattgatgtcctaagcatttatagatgttggggatgaagacccaagtttaagaaagcacttgccaccaaatctgacagagtttgctccctagaccccatgttttaggagcaagctgactcctgtgtgccatcttctgaccttcctgtgcatgcatacagacaaaaataatgagtaaataattagaaagtgatgctgaaggaataaaagacttcagtgaaagaagagagagaagtggtaaaagaaagataaagatagggtagcaaaaataaaagatgtttaaatggttaaaattaaggcagttgtactgtggaactgagtcagcccttaggaacaggtacttctcaaattgctctcatactggcttcacagttctgtcattgagaatatctcaagaggactcagagatgcatttttaaatctgcttggagaaagtcccatgcaggtgagattccacggtgtgcacgtggtagtgataaagctggacacacctgttagagacactttatttttaagacccccagatgtacagctttgtgaaagatgcatcaaacatgatatcaggctgttttggaaaaagttattaccagttccaaattcagcttcttacatttaacagtagtactagaatttgctttgtgcataaacccttgattgcagtgtcattagccagcattgactggtgtttgtcagtcgagctcagctatgttgagtctgcacgtgtaaagttcttaccagatcaaagttgcaatgcaggcaaagctatagaattattgatactttgatttgattgctgactttttataattttgctttattttcgctgcctacagctgttggtttttactgtaagtatcttggtattcttttgtcttttgtgtgtagtttgttattttcaaaaagaatatatgatagtgaactcaatgaaataggaagcagaattccactcatgaggtagtactcttgtactggtgtgaagccttttagttatttttcttgactacatatgtttttgttttcatacagagtcagaatatacatgccactttacaacttatgaaaagttttttgaaattttttttcttactctgtgtgtgtgtgtgtgtgtgtgtgtgtgtgtgatggtaaatgtgtcatggaatgcttgtgaaagtattttttttaatctagcataaattgaagcttaaagaattcagagtatgaaactaggaatttagctcggttgttagagtgctcacttaacatataaaagacctgaagctttcgtaggtgtcatggtggcacaggcttgtaaccccagcagttatttggttatctgaagttcaagaggatcatccttgactgcatggcaagtgtgaggccagcctgggctaaattcactgtgacaaaatgacgttggattctgatcccctccaccctgagtttacatactctttttgcttgctttttcatttagtagcataactcccctctccccttctatgtatctatctgatgtagcaaacttaattctgcattcaaaatctttagtgatttttttaattgtagatatcatacactttttaaagtaaaactttatagagagtggttaaatacaaatgtctccatccctaggattttgcaatgaatactttatttagatctcacaaatttcattaatgcaaaatgtgtgttccaatccccttgatccaaatgagatgttacactctcactcaccatcttatttaacaaagtaccttaatatatctggatgtaatgttctaccaacattatttaaaaatatggtaaaattcgtttaactagtccccaaccatagaaatttgtattttgctaagtctttgtatttatagattcccacgttttatatttgtatattatcacattttgaacttggtctatactaagtgcctaaaagtaagtaaaatgctcactatttaccattgatagaataggataagtgtgacaattcttgatctcttctgctctccgtcacctaggaggcatgtttgtatattgcacatgcctggtcacttcatgggccatcctacttctctgttactgtctatccctgaaccacttcccactctctggaatattagttacctcctcaggtcagaggctggtccttcaccatgtgttttcatcacctggaacactgggtacaaaggtgcttcctaaatatcagttcagcaaagaaaaacttaaagacaaagtaaactttatttcttaaagatctttctaaaaacatgaaaaaatatctcattcttagtgtagtcatggtcagtacatctttaaaggttttgctttgatacaggatctctctatcccaggctgtcctggaacgtgatataaccaggccaccctcagtcagacccgcctgcctctgctttccacgtcctgggattaaaggcgtgcaccaccaggcccaactccttaaagtatttttttttttacacatactgaatcagagttagcactctagaggctggagcaatgctcagcaggtacaagcactgggtacgtctttagtcagttccacgagatgtggtactgctcaaatgaccacatctcatatatgcagacagtcaagcacacacacaagtgaataaataaataaatctttaagagtaaattaagggcacatagggtgcctttaatcccatcagatagaagacaggtggatctctgtgagtttgaggccaccgtggtctacaaagtaagttccacgacagccaggtatatcacatagagaaaccctgtctcacaaaacaaaagagtatagaaaaatgatcaggcatagtggcacgagcctttaattccagcacttaaggcagaggctggcggatctctgtgaatttgaggacaggaagggataaacagaaacctgcttggaaagaaggaaaagaaggaaaggagggagggagggagagagaaattaaatctgagggctgatgagatagctcagcaggcaaggcatactactaagcctgcccacctgaattctgttcctgggatccacatggtagaagatcaactcccacattttgtcctctgacttccacataagtgctgtggcatgagtatgccactcacacccacataccagtcacacaaaataaataaatgcaaatacacacacatacaaatatatacatatatatcataaatctctgggcaaatgaatactgtgtacttccaagaccttttagaaacatgtttttctgggactacaatgatagcttagtgggagaactcttgcctggtgtacatatatatgtattaaaagaatacatacatacatacatatgtattaaaagaatacatacatacatacatacgcatgcacacacgcatgcatacacacacacacacacatatatatatccaaaaataaaccaaacctgcttttattttaatggaatttttgtgtatgcatgtttgtttcataactagaattctaggtgattatacaattctttccttttgattcttttgaatctgtcatgagccaaatattttgtttggccctgtatattattcttcatctggcagtgtgtttataaataatgtacgtatagtggttctaaaatagattctaaaatactcttactggtgccagtgaagagaaattgttttctcctgacctcagtgttttccaggttggttctcattgcattgcacgttcatctgggtttctgttgtgctgcctttggatgatcccatttacagagttcttctagaagcacctctttttttttttttttttaatacttgactttgtgttatgtgtctatggaacaatttgtcttttacctgaggaacaaatggctttagaacgttcagctttttagcctgttcaaaatacacaactctgtgtttcttcccaggtgttagaacagcaaagaaagagagtggagttgtgcaaatccctatcctgtctgtgaatctatccttctaaagctgctaataaaggcattgatgttttgccatgttctcaaggtcagccagaaccacttgctgaggcttagcctccaaagttctatcagagagatccacttctagagcctaagatccagtccatgaaaagtgcagagacaatacaagtaacacaagtactgtttggttcctttttaaagagtaaaagtgcatggtgaaatccgttcacccacttttcttctcctgacaaccaaacttcgacctgcttacagtaatttctagttctaggcagagaagcatgcctaatttgggtggagtataaaactaccttgtaactcagggaataatggtgctattagctgcaactcagaaactcattcattggcaagaaatatgagcaagtattgatgtctcagacctttacatacatcaaagacagccagcttggtacatcttcctagaacagagactactgagtacatgaacttgacccagggttattttattctgtagaattgcttgctgctgtgcctgttcattattctcatcttcccttttttcctaacagtgcgtatagtgctagaaagacagtactgaacaaaagtatatacttatttgctgccatcatcacaagtcacagccataaatatccctattgtaaatacagcttattttcctatggaaattcagcatttgtttattctgtcgtgtcattgttcttttttagcatctttcctgaagtaagcattgtcctggagatgtgagctcttcccttagataagacagaaggaggaagtgcttacatatgcatgtcatatgtacatatcttagctagaatgtatttgctattagcaaatcacagaacaaagattgaggtgtttaatcatatggacatttaaatacttttctctttaaaataaagttaatataaaactgagaaaataggctgcagaggagatgacatagtaggtgaaggaagtatttgttacacaagagtttaatacctagcatttgtatttacaaaaaattagtggctgctgctacactgcacagcagtcaccatctcaaggctggagaaatagagagtaggggttctcactggctactcagtttagtggaatcaaggagctccaggttcattgaaagactatatctcaaaagataggtggagaaccgttgaagatacctaactctgacctctacatgcacacttatacaaactcacataaaaaacacaaataatgcctccctcaaaaaaaaaaagtctaggattgccactttatggaagaatgagtataatgactcagaaggaacacaggtaatgccaaaaagtattggaagccagatatggtggcacacacctttaaacctgacacttaggaggcagaggcaggtgcatctctgagagtctaaggccagcctggtctactttgtaagatccagaactgctagtactacagcggggaggaggagagggaggaagaggaggggagggaagggaaggaagaggagagaccgtgtatccaaaaacaaaacaaaacaaaaaaaaaccccaaagtattgaagtcaagaaaaagatagcctttcaaaataggcagcaagacaaaaatgtaaagtaataaacaattttaatacggacctgaccaaatttcctttctcacattctaggattgtaaagattggaaactattttaaagacctggaaaatatacataccttttcaaaggctttttaaaggttgtcactgaaaagcttgaaaagataaattacctactgtcgggaagtttgtatcatgctctgtatcaagatagaaaacagtaatcccatgttggttggctccagtagcatctgcactcttgtgcacatacccacaaacaatacatatggagtactcttcctacttgttaacattaaatagcttgaggcctagagaaatggcttaatgattagaagccccatccagaggacccagcttcagtcccagatcctacatgatggctcacagtcatctctaactcaagtcccagtggtccagcatcctcttctggcttctgcgagctcctagcattcatgtggaacacaagcatacatgcagtcagaacatggttttttttataattgatataaatagctttattaaggaataattacataaatgtttgtaatatgttaaacgaataatgtctttaaattgtattatcacagtttttatctttgtgaatttctattagtatttttcatctgaagaaaatggatacatttctgtcatatcctgtgtgaaatagaagtgtatatttcaatgtgtagaggggtccttgtactccaagttgcttttgggggtatttaaatgttactttttgaaatactaaggctcaactttgtgtttatatagatattcctgatcaagttataagagttttcaaagcagatcaacaaagttgctacattatcatcagtaaggataccacagctaaagaagtggtctgccaagctgtacaggaattcggtttgactggtgcatctgacacatactccctctgtgaagtgtctgttactcctgagggtgttataaagcagagaagacttccggaccagttctccaaattagctgatagaattcaactcaatggaaggtgagtgagcatgccctgaatacgcagagtgctgtttgtggattccctgttaaaatgggtgttttaggaacaaacagcatgcttctttgctagttctaagaattaaagtaagatttctcctctcaagtttttgtctctacaattatgtaaatagaaacttggagggatccttaaagactgccgtaaagagaagaaagaaagcagtcctgtgtaatctatgcccagctgtaaatagtcaaggcctgcctctcagctactaagtaccataggtgttctgttctaaagagaacaagggttgatcctacctaccacttgctgagatgcaacgtttatttaatataggagaaatcactaaggacaacttctgtgtacaggtccacttttttttgcctcacttgaaagtttcagacaggaggaaaggaggaagtgggtccaatagcaactactgaatatggatgaaaacgagtcttgatgtatgtgctttttcttgtcagtcagaaattatatttcctgtgaacaaacatttatctaatagcacccagatgtcaggtactgtattaagttctcattgctgtcacaaaacaccaggcagaaacaacttgatggaggaaggattgactttgttcctggtccatcgtggcagggagagtgtagcagagcagaagcagatcctctcatggcagtcaggaagcagagagggaatgagattaggggctagctataactttcagaagcgtgaccccagtgacctgccttctccagctcatccttctttacaaggcatgcaccaccttccatctgaactcatgtgaaacagttcatattggaacgttctccccagtcgtgcagtctcaaaatgtaaaacacagtccatcttctaagaatcttaaacatcttaatccttccaacttgtttcacacagtttgtttgcccaaacccagagtctcttctaagactcaggacaaacccttagcttgtccttgaagaataaaaaagatgaaagtatatagtcccagcactcaggagatggaggcaggcagatctctgtgagtttgagtccagcctggtctacaaagggagttccaggacaccagagctgttacacaaagaaactctgtcttcaaaaactaaaacacaaagataaaagtggcactaggtaaatttccattccaagtgggaataaccaatcagaccacaataagacaaaattcgttgaggcaaacattaaatcctgtagatccaagcctgtgcccagggcacatggtgtcattctgttggcttgagaagacccacctttgaactgtcttgaacttgttttggctttccttgccttgtctggcattccacattgatggcatctccatagtatcttcatcttcacctttcactttacttaccaacctgcccagacagaggctgactgctgcagtcttgcccctgccacacattgcctggtttctctagcctttctttgaaaaaatcttggtagaaacctccatgactacatgcctgcaaaaacacatagacagtgccacagccggctgccaggctaagcaatagcaagacccttcggactcgagctgcagtagtttatgagtggctagatagttgagcatgataaagttaaccctgggaaacaatatatttagtggcaggcactgtgctaataggggtccaggtggctcgcccttttttcaaaaggaagttttttacttagacattttgtatttgtttttgaagtactgtcagttgaacctagatcctcttacatggtaaggcttccaccactgggctatatccaatccctatcccacctgccacaccccacccctgttttaattgcttatttttgaaacatgatctcactaagttatcaaagcacaccttgatagaatcttactgtctcagactcccaagtaactggaataaggcctgtgccagtggacatgatggtgcacatctttaatcccagcactggggagactaaaactgatagatctttataagtttgaggttagcctggtctagagacctttggcactgagtccagacaaaatttcttttaaattcgtttacaagttagcacactcagctgctacaagaaagatctgaccatgtcctgataagcccttcagacagttcctggtcatcctgatgtgcttgcttcctttaaatgagcagttctcaacctgcgggtcacggccctttcaagtggaatgatcctttcactggggtcacatgtcagatatttacattatgattcataacagtagaaaaattacagttagggagtagcaacaaaaatggtttcatgattggagtcaccacaacatgaagaactgtattaaagagttgaaagattaggaaggtggagaaccgctgctgtaaatggcactgatccttttttaaaaggtttatttatttatttatgtacatgagcactttatttgcctctacgcctgtatggcagacagcatcagagagggcatcagatcccatgacagatggttctgagccaccatgtggttgcttagtattgaactggagacctctcgaaaggacaggcagtactcttaaccactgagcctatttgtgctgatctttttaaaagcatgccctccttagttccagcttcaggttggctgataaaactaagctaacgtgtttatattcttactctttctcccaattttcactataaaagtaaataaagcaactagtaatagtgttggtccacagactggacaccttatcaggcttgaaatttcctctgcctaaattatttttaaacttggtctccagcagtcttagcataaacaaaatggtaaacaagttcttaggcagaatataacatggtgacctctaatccagttaccaactgtcatctatgatagtggtattctaggacttctgtgttccgtatttccaaggtcttacattttcctcccaccaaccagtcccaaaagcttagtaactatttgataaggttagctacagcaatgaccctgcttgtccagcaccagttttctgtgttagtttcccatcactgcccctaaggaccagacaagcaatttcagagaagaatctaacattgccccgtagagcttttattctcaggacaacacatgatggttcacacatgcaagtagtttcttaaaatgactgacttcaagataattttcatcattgtttttattttttctgcaatgatagatgttagacagcagaagtgggacttctcaggatgtcctttaaagtattttcccattccatctattagatgaaacctactaatgataatttccttctcatttaggtattacctaaaaaacaacatggaaacagaaacattgtgttctgatgaagatgctcaggaactacttaaggaaagccagctctccatgctgcagctcagtaccatcgaggtcgccacccagctctccatgagagactttgatttatttcgtaacattgagcctactgaatacattgatgatctttttaaattagattccaaaacaggaaatactcacttgaaacaatttgaggatattgtaaaccaagagacattctgggttgcctcagagattttaagtgagtcaaatcagctgaaaagaatgaagattattaaacattttatcaaaattgctcttcattgccgagaatgcaagaatttcaattccatgtttgcaataataaggtaagtttgtatagatacctatatgatgacttttttctataaagataccattgagttcttttgttcttgtttaacaaaaaggcatgacatatggttacatacccagtgagactccattagaaaaaactattttttttttgtcagtgggtattaattacagatagcttcttggttaagagtgggagctacttccccctcttagtgctgggaccttgtctggtttgaacttacacagactctgtgagttcctctgtatatcagtcttgtatcttgaaggtggtgttttcttggagtcatcatcccctctggcttttgctatctttccacctcctcttccaaatagatccatgagcccaaagacatcccatttacaactgcatgttccaaagtcttgtcgctctgcatgttgtctatttgtgggttgctatgttagttccctttggctgcaagaagtccctctaataatagcttaggaaaacactgatctgagtcccagcctggagtggcccctggagattcctgataatgtttcttgggatcagtggctgataaaagaaatagaggtggctagaacagaaggctaagaggaaagcttattgttgttgtttgttgtttttgagacaggacctcatatacatacacacacacacacacacacacacacacacatatatgtgtgtgtgtgtgtgtgtgtgtgtgtatatatatatataaatatatatatatatatatatatatatatatatatatggactggaactcactatgtagaccaggcctcaaactcacacctgcctctgcctcccaggtgctagattaaagacatgcagtgacacacccaactaggaaaactaatgttcaacttttgaataagcattatatatctacatggcagcccacaactatctgtaacttcagatctagggggtctaatgtctttttctggcctctgcaggcaccaggcatgcatgtggtacacatacatacatgtagacaaacacatgcacataaatctttaaaaaataaaatatgctgctaacaccccaaacatgtcttggtctgcttctgcattctatcctagtgatttaactatagttgctagagctttaaattgagttctcacagaactagtcaagctctttgttcttgtcctcgtcctttctctggctgttgctggcatgtttgatatgagccttagagccagtttatttaggttttctaaaaaaaaagtcttcagagtattttcatttaaattacatagaatatatagatttatttagcaatggctcctttacccccaaaacactgctacacttcattttcgcctgtgacattcatagttttattcatataagtcttgaacatttctttgaatgttcagtatatcttactacacatggcatccttatattgtcttaattaccctacaatctgatggaaggtgtgtgtgtgtgtgtgtgtgtgtgtgtgtgtgtgtgtgtgtgtgtgtgtattatataatcatggtaagttttatcatattgttctttggtcttgtggtttgtgaattttaatgtataatgtctgttctatgatgggttcatcaaatgtatcctccaaaggcaagcactctttattcttttgctgcatatagttgttgcattctttctgaatggggactttcctgtactagctatttacaaaggttcatatgagagagaagctagggcacaattcctggttaacaggattggccttgaaaattattttgcctttggctttttaagtgagtggagagtggcagccttagggctgtgtacaacttagtttctccatgctatcctcctgaacagcttccttcagaatttatctttacaggcactgatttaatattactacccctgacattcacgttgaagaaatcaacccttcctgatggcagtgcacagactttcttgctcttatcccagaccaggaattgttctttgccttgtaactttagagccctattgttcagccttccttcattctttagctgcacgtgtcattttttggtccctctacttactgctgtttatccttggctaatttttggcaatcattctagtttgggacttggctgaagttacattttctgttttattcttacagtagtggggaggtgatttcttagaaacaagggtgaataaacatttaattcctaccttaaaattggaagttggagaacattttacatgtagtggtataggtaaaaatcagaagcccgagaagcaggggactaaactgtaggaatgttggaatgtattaggttcacactgtttattgataggtgacctttggcatgcagcatgaaagtaaaggaatgaggagaaactgctggctgatggacataaatattgttttcaacttagggaatatctgaacttgtttaaagtccactgcagcagggatagtgggtatctggagacttaggggacgagattggagccttgagatacagaaacttgaatcaagagtctacctcagtcagtcatgtaaactgtttcaggtcaatgttgtgtaagttagttgataatgagcaacactccaatgcttacgttctttttaactcttatgtgattggtacagttatctcttacatgcagagtatagagcaattgttatactaccagagagcctctggaagagattcttcttgttttaagattaaaagagtcctttttgtttatttttaatagttctcttttgttttattatatatagatcatggttgtgtctttattgacctaccctttcctctgaatctattcttaatgtttttattctcattttgacagtggcttgaacctggcaccggtagcacgactcagaggcacttgggaaaagttgccaagcaaatatgagaaacatcttcaagatctacaagacctttttgatccatctagaaatatggcaaaatacagaaatattcttagtagtcaaagcatgcagcctccaattattccactcttccctgttgtcaagaaagatatgacatttctccatgaaggtatttgaagccatttgaaaattagcatgtttagctttagctgcagcatttaatctattatccacttcaatataattatttcatgtcactaaatcttcatacagctaagtgcagtgaatttatgacatccaaagctatattgttgacagtagcaaattgaaatgttcacagtaaaagttcagatataaacttgacactaagataaaactttgctgacacctccctagcacttaggcacataccaaacatacccagccttgtatttgctttaagcttagtaatggtttttccttccaattttttaaaatttaattctcatataaggaaaagtacccaaaacaaatgagcaactaataaaatctaacaacatagtcagttttttgggtttttttgtttttgttttgtttttttggtttttcgaaacagggtttctctgtgtagccctggctgtcctggaactcactttgtagacaggctggcctcgaactcagaaacccacctgcctctgcctcccgagtgcttggattaatggcgtgcaccaccacgcctggcaacatagtcagttttatgggcaaaatttagtattgccagcaccctaaaagcttgctcctgctcactgccaacctccctcttcctctctttaaggtgacttgtatcctgattcctaatgccacagttgagtctcaattgttcttgacctttagacaaacagattcacagaatgtttgacttgatttttgtcttattttggtgaaaaaatattaggattagggagaatcttcactgttgtccaaaactgcttagcttagtgatccatgtcttagtgctatacagtgattcattctgatctgtgggttttaagtagttcccattgttgtcctgctgtgaagaatgctgtttattctctgttcatactctctaggcagatgtagtcttaatgactatacaatatattcttagtagactctgtggctcaacccttaaaaaaaatggtgtggtggtaagttggtttctagccctggaggtgttctcactgctcatccttgccattatctgttcaattcagctctgtttttcacattacaataactatgtgcttataacttgatagatagtttatagcttatagcttatagtttgtactttgatgactatgaatgggctaaggcaccctctgtgcgctaaccctcttgacagttaccagtttggattccttgctcattttatagtagatttccttttttgtttacaatttctacaaacattctcttctacatcctgggtatagagtaacttgtctgttttaaagttatttttgatgagtagaaattcttaactaaaaagttttttttttaatcttttcctactatagttcatttacagtctatttgcattaacttttctgtgataatagtatttttcctactctgttcccttagtaacctcatactgttttctattctttttactgttacaccagatgatataagtgtcagtgtgttcacacattaatgttgtgttattgcaggccatgtgaagaacttgaactattcaagtttcatttactcatcacgaaattttatttacctattgtgctgtcaatcctacattgttttactgtcagttactaaaatcagtgtttaatctcacgtgtgtctatttgtgcttgctgctctttctttcatcctacgtttctgtgtgtccatgtggctagtgtactttgtggttttgagggctttgtttagttgtttaggagtttgattttgtttggtacatcagacaccgttattaccttaaagtgatggagatctcaatttttgttcatctgaaagtccaagacttcaatttcagaaatatagtttggattggcagctgctttccttcagcattttgaagtagcatctgttgttttctggctcccattgtcacaattgagacatgaactgtacacttactattctttgcactgcctctgctgatagctgcagttgggacctttgccttctcatggttttctgttctactaggttttataaggtatgaggcttgtaattttgtttcatttgtagctctggtttacatttatgggtcatattaaaatagattgattttccttcagttttggaatattctgtatagttagttttttatttgcccgtttctggcatcagttttgggactttggttttattttgactactgtgcctctttagtctcacatcttcctgcaggttatcttgttgtcttgctgttctccaagtattgtcattcgtcttgacaatcttctcttcagctgtgtctagtcagtgaaacctgtccctgaattcctactctacttcaatgtttctcagttttactgtttcttttctttcatattctctgttaaagtagcagtattgattttgtatctttgaacatgtttaaaatgggtatttcaaagtttctctgtagtgactctgtgatctgggtcttccctggttctctctctgaatcatcttttacatcttgtcatgttcacattcatttttttcttgatatacattgatgtttttattttttggttttttgtttatttgtttgtttagagaatagtgaaaaagttacctccccccaaaaaattggaaatttatgactaatattctgttcttccaaaaaggattgaaccttgctcagttaaggcaatcacaatacatgcatatacataagtaagtatatatgaatgagtacactgtagctgtcttcatatacgccagaagaggacattagatcccattgcagatggttttgagccatcatgtggttgctgggaattgaattcaggacctctggaaaagcagttagtattcttaacccctgaaccatcttgccagccccaatcccaaatgtttttaattcatttccagggttttaggctttcttccaatctacatttggttcattattatcttcagaataaagtcagagtcccaaagcaaaacattaacgtttaattggatttaactctattttattcttgttacctcaaagcactgaagggcttatttcagctccctgtgccctgtctgcccttgctaactgtcatcagcagggagagtctcctagttgcctcagaatttcgttatcatcacattactttaagaaaagatcctcacagatttctcacgtattcttacaacattgttctcacttagcatggttggtgttgttttgtttccagctggcattgaggccacgaaccattcctgtgaccagtgtacaaatgccactcacttactgtggaaagggatgtgatctagacccagagagctctcaaactggcttcagggctttccctgttagaaaaattgggttgcactaacagttacagacaggtgtagttaaatgctactatctatggtcagacagactgacttttgaacactgacattcttgcctgatgatttagactaggtaagccaattaatctcttcaagaaaaggtgacagccttcaactttgtaaattaaaaacttacacacaggtattttcataccaatgattaaagtcttggtgacaaattcagattcaaagagagaaaaagtgaatatgaggccagaaagtatccccatgacacagctaccttagttttagctaatttttaccatttgagaaagaattccagttttacttactctcccactatttactcctgtgagtatatctgctacttctttaatagtttttatttctttttttttgttgttttttttgttgttgttttttgtttttgtttttgttttttttttttggttttttttttttttccgagacagggtttctctatatagccctggctgtcctggaactcactttgtagaccaggctggcctcgaactcagaaatccgcctgcctctacctcccaagtaatgggatcaaaggtgtgcgccaccacacccagtttttatttcttaaaaagaaaataagagttataaatcaaaaaaattgcaggccaacttaattattagtaagtaaatgggccccacagtgcctttgtcacctggctagcctaagttgtcaggtgctgtagcttccttcagtagaacaaaccatgaacagaaggagattgtgtgctgtaacttgtgcacatgcctgtgagataatgaaccagtttcagcagccatagacaatcactttctgtattctgtattcccatgagaaacacagctgttagaaactcattccctggggtcagggctgaacagtctatgaatttatcaagtcttaaaagggagtggggggacagtttgattaacaaaaaaaaataaaaacacttacctgtactcaggagtaataactgaacttgtgctacttggagataaaattgtaattatggaagtttaaaaatatatatatttcataggaaatgactccaaagtagatggcttagtaaacttcgagaagctaagaatgattgccaaggaaatccgtcatattattcgaatgacttctgccaacatggaccctgccatgatgttccgacagaggtatgacatggaaatcacattatggtagcatcaggctggtgaggtaatgatgtctgtcctttgttgtgtacacatcagcctccagtaatctttcattacagtaatcctcacaggtaagcaatagtcaacctccctttacatctgaagaaattgaaccccaagtagttttgttttatttttaatttatatatgtttgcctgcatgtatgtctgtgtatcacatatgtacaatgcttgcagagtccagagaaggtgttggcctctctggaactagtgtctcagatgcttgtgattaaccatgtaagtgctgggaattgaactcgggtcctctgcaagcaaggtcagtgcctttgactgctgagccatatctccaggccctggagcagtttttatataacttgctaagatttgagccctagtttttccaattacttttctgactatatcagtagttctgtatggtggttaggtaaagtaccaataagcaaataaaataaaaatgttgagctccctgaaatcatctgaatgcaaattgtctcatctgctttctaacctaagtagtaaagaattattctgcgcctcttttaaagtcctagcacatctaactagtacttcagttttctagaacatttctttcccaaaagttacagttatattgtaactgtttgcttgcatttaaactctttcccagaaagtacatttagccatgctacatctttattagagtttcatttatcttttaattttatcggagaattctttctgtactcactttatagctgaggctggtctagaactcatgatcttgcctctacttccaattgctggtattacaggtgtacactgccacacccaaaacgagaatgcttttttaatttgatactttgtgtactataaagactactacagaggctggagaggtggctcagcggttaagagcactgactgttcttctgaaggtcctgagttcaaatcccagcaaccacatggtggctcacaaccacctgtaattggatctaatgccatcttctggtgtgtctgaagacagctacagtgcacttacatataacaataaataaatctttttttttaaaagactactacagatttatgtatagagtttatagaaagtgtattaagctatttccagtaatttttgtagtcttcagcatgtaagtagacattacagttgctaacttttttttatcagattttccttttggacctctccaaatagggcattaataaataaaataattttaagtatatataattgctatgattttaaaatacatatattctaagaaaataaaaatacttgatactttatagtgtgtgttggattaagtttgtctgggagaggtattgcttgcgcgtgcttcacctacatcactatggagcagtcactgcttttcttagtagctgatctcatgttcgctctagtttagagattctcagagtagtgggaaaggagtgccaagtctcttcccatctcttgtctttctcttggtaatgtaatgaaatgtcacttctccaaattgtggaaacaaaaaacagtaagaagcagggactgaagcacacctggaggaggcttgttgtctgtctttgtttttgttgaatgtcctagtacagtggactttccactgtctcttgtcttatgtgaacctccatttactcgtgcatcttttcattcggtacctgaagacataataaattaggtccctgccaaatcatctgatagtgtactaaggtgccagctgtacttccaaattaatataagagggccaagagaggattcactcagtaaagtgaaagctcgagtccttgtcagtccccagcatcatgtaaactagctagctaccagccaatgaaaataatcctgtctcaaaatgggaggggcaggggagggcagatttataacaccttaggaacaacaccagaggcttacctctgccttaaacacacaaatgtgcacacatacccacatacatgcacacaaacacacaactaaaaagaagcagcctggctgtttgcttgggaataacctgggttgagtaagaagtgaatggggaaataaatatatttattctagttcagttgtgtccaccagcacctagattattagggtctcattgtagactggcttggaattcctcccaggtcatatcgcacaagtgcataactgcataagtgtacaccaccacacaccacccctgctttgttacctctttattttccaagttgaatttgctagtcaatttttctcctaaaatacttccttagagaaatttcttcacttagaaatggatttacatatctgtatgttccttgtaatttttcagcatttaaaggagtggttccaaaagtgtgtagagactctgttcttaagaccagtccctacacttccaaagacagaatagaaagtttgaatggaacacgtcgtgttccataaactgcttagtaacaccatcctttaatagtaggcagtggtggctcacatctttgattccagtgctcgggagtcaggtggatctctctgcatttgagttcagccatgtatacagaatgagttccaggacctccagggctatatagagaaaccctctcttagaaaacaaacaaacaaaaacaaaaacaaaaaaatcaactaatggctagacgggtgttaaaaatgcagttgatctaaagcatgttttaaagtacatgctatagaggtgtctggccttcaggactcaatgtgtccttcccagtccttcatttcattaaagccattttttactgttaagatataattttttcctggtaaatttttctgttctgttctgtctgcataaattctctgactctcaactgttgtctttttttctgtgctttcctattcaaatacatgcttcaatgtttgtggctcttgcttacaggaagaagaggtggcggagtctggggtaagtggggaaatgaacaactggaatgaaggttgtgcatctcttaacatgtgctgcatccttttcattaatgcacgcaaaccagatagcatgccttctattaactccgtcagcctacattctgacaaatgccttttgctaacaaggtgaaagtagtgatggaactagccttgtattgatctcagttttgtttgttttgtttttccattattggcatcctgtagtccctttttagatttaaatttaacagattcatgagatgtagacaataataacaaatatttgttgcatacttcctgtgtcctctacactgttgtaagctcccaaaatgaataacctttaaaagtcttttaccctatgagctggtctgttatccccatggtacagatggggaaggtaaattgcccagtcttgcagcttattgatggtgtatccaaacctaggcagtctgctttaaaagctgcctacactttctctaatttcagtgcctgtcttatgaaagagaacatatatgttgatgtataaaaagtctgtttgtaagggttgcattttttattagttttacagagagacgtatttacttaatctgtattgtcaaagtgaatagaggttttaatccctcatcagatccactgaatgcctgaaacttgaagcttaaattgaaatttacttttaagtttctaccacctttgaataaaaagattcccttttctcccctaaaacttcttaactgctcagcctttgtggtttaagtaggttctggactcttagttctgcattggtagccatctggtttagagccacaggcagttaaagatcgtatgcatcattttcctagacctttctattttaagtaaggaaacagttggtactataggtgcatggaattgcatacagagaccacatagaattttgatgtttaaaactaatgaatgtgaagttagatacttaggctacatataagaatttttttagccatgtctttctttgagtcttatttgtggtcttgtttttcatttggtgaacttgactctcctcctctggtgtgtttcttgtgtgttttcttctacgtcatacctttgtgtcttggtcttccctggttcttcttactgaaagtagaaattgatgcattaccacctcagtagggcatcttatgacctagtgactgagctacagcagccactgttcaactgatagcattttttcctctagtatttggagcttgcaaacagcaggtgttcttatttcacatcagtgtttgatgctttgcagtggttcagaagatactttatcatcatctgtcgttctcatgcattagaactttgtagttttgtttacaagctggcttttttatattggataacaactaagataaaataattaaatgctagcattaaaattttgtttataaatgttaagactttgtttcactgtgagttcaatctctggaatccacataaaagttggagataaaccagttccatacagcagtcctttgaccttcacaaatccactgtagcatgcatacacatgcacactcacacataataatagtcaccacattataagatgttttatcttgtgtaccaagaaaagccagtgcagtaccttgtttgtttgagcttattgaaatgcttctcacgtgtctggatgctggtgggatcttgggactttctcagcacggagaggagacttgggagggtcatagctgatagaacaggcagcagaggcgataaggaatcatcgaggggagggaagtcaggcaatggtcaagggaacttagcacccctaactgtctaacatttcttctactataacttactagcaaccagctgcgtcttgatttaatttttttttttttttttaaagatttatttatttatttattataagtacactgtagctgtcctcagacactccagaagagggagtcagatcttgttacagacggttgtgagccaccatgtggttgctgggatttgaactcctgaccttcggaagagcagtcgggtgctcttacccactgagccatctcaccagcccgcgtcttgatttatgtcagcttcacagaataaagaccgactaatgattatccaagtggtgcttttcattacatgtccagaggtacaagttcagtcacaattagaaaaggcaaacagaacagattattcttgttattattaaccatataattccagattaaagaaagtatctgaactggtctttttatgaatagcaaatacctaaccttttactgtgtgttttatcatctatgccataaagtagaaaaagtttgttttagtcaacctatcttatttactgaattctattcctccaggggtgtaccctgtatgattccctttctttaaactacgtttgcagagtgctctaggcctataataaaaagagacctataacctattcttctggccagtcaggatttttcacttgtgtctgtttaccctgcaccaactatactgtttgagtttgctcaagggcagctatcccaggcagattcctggagtaatggcttcattaagcaatgtgctttctgtgcttaaccaactccagagcgtaaggtggacttacaaatagtggccagatagagttcatttaggattttgctaaaaaagactcagacacaacctttctcaggaaaagacgtaaaatgaaccataattcagaaagtccccaagaatgcagcacacagagaccacattgtaagatatttactgaatttttcaggtttcattctttttaatcagttacttcttaaagattaaagggtaattcactaattactagatttttcttccaacccattctgcaaaatttgcagtcttttctgtgggttactcgcagccacatcatcatttctgcctgactcgaaactacaagttgccatcaatgtgtcaagagatcattcctcatgtctttaatcccagcactcgggatgcaggaacaggtggatctctgagttcaaggacatccagggctacacagagaaagcctgtctttaaaacaagactatataaaatgcaaggcataactgtactagttctcccccacccccaagaattgtagaggtgttggttagtttgggttttttgtttttgtttgtttttttaatttcagtagcctccaaaatcgtaggattatgacattttcatgcacgtatccctgacctttgcctcctttctccccctcttctgggagccctacttcaaaatccttaaaaatgtatcaaaaaataaataaaataccaataacaggttttcagttttgccttatatgatttacaatgaaaacattaagatttggtgtctgttttaatctaggtgtgtgagcattgaaggacaagtagcccatgttttagaatattttctgtaaatatgatgctaatattaaaaatagagatattcttccctttaaattaaagaccatttgagccatgcacctagagtcatgagtggtacctcgagtccacataaaggcaggaggagagaagcatgcctcagacctcacagtcttgctggggcatgttcccacctctgcacacacatggtaataagtaaacagacacacaatcctctgtaagcattgagtttgctggcctgttagaaatgacctgcaaaaaggaaaaaaaagacatgacctgctacataacaattgctgccttccattggttctgaatgtgcatcgtataagtaggcttgacagaaaaggtagaggtgaataaagtcatagcttacttgactcgtacttacttctaagacccagtttgaagtaagtcctatcatgttcaggagtattacatattacatatattacatatattacatatatcatgttcaggagtattacaaagacagaatctcagcaagttctagaatgcaagtaattccattgtgcctgcagggatggtagcaattttttactgcatttctgatctctcactatgctgggttgaaatgttattttcagatattatcttggttctctttaatttttagtcaaaatatggttactggaaaaattggtcttcatgtttgaaatgaccctgctgtcacaaaatgatgctttcatagcatactgcaagcagccccggtaacaaagctgctctgtttgcctttgctgaaggattgagaacaaatttatcctaacctagactcttgccacatcttagattgtgcatggcctaaaaggaccaaaggaaaggttttgttagcacagtgtgccatgggtttgttgcataggcacactaaaactgtaatggaatatgttgctcagggaggaactggtatcttactcttttgaaatccatgttttgccagatcttgttcttaattgagaacattgccatctgtgccaaagtactttgcattaatgctcttcatcttttaactcatttacatcagcatgcaatagcattaacagaaaaaatatttgaatcttcattccttgatgcctaagtctcatctttacaggctctcattgcagtttctgtcttcttacaggtcattgagtcaaggcagcacaaattctaacatgctagatgtccagggaggtgctcacaaaaaaagagcacgccgcagctcactgctgaatgccaagaaactgtatgaagatgcccaaatggcaaggaaagtgaaacagtatctttctagtctggacatagacacagatgaggagaagttccagatgatgtcactgcagtgggaacctgcatatggtacctgtgagtagttttcctatgtgtcacattggtgagcagagcaaaatagacattttgatatccagaattagtgctgatttcatttgcaaatacgactactgtactccagcagactggtctgctcatgagatactgagtcccatgcagcccttgaataactctgaagaagggagagaggtaaatagttgttctttaaaggctttataaatgagattttttaaattggagcattgccaggcagtggtggtgcacttggcagacagatctctgagatcaaggccaacctggtctacaaagtgagttccaggacagccagggctatacagagaaaacttccttccttccttccttccttccttccttccttccttccttccttccttccttctttctttctttctttctttctttcttctctttctttctctctctctttctttctccctttctttctttttataagaacattaatgaaatttttaaatgaggagtagataatacacagtaagtcagtcactggagagctagttcaggtgtgaagagcgcttgctgccctcacagaacctgaggtcagtttccaacacgtatatggtgtctcacaactgtctctaatcccaattccaaaggatccagtgccctcttctagactccatgggtactacaaatacatggtgcacaaacatacatgcagaaaaaacacacattcacaacataggaaaaaatttttttattggaacattatagaaaatactgtttcagaacgttattgcccttacctataaatgcaaagtgacatcaatactaggctaaaattactaattataaagcttgggggtttggttaaaacactagcagtgataacttaccagtaggatacaagagaaagtagacatatcctgacattgtggaagggattttctcctcactactgacaccttagagtccaccctgcccactacagctctgctcagtaagtaactgtctccccaaggaacacaccctgaccagtgctgccttcttcaagtgcaggcttcagaacacatatctctgggttaagaaaattgtgagttaagggctggagagataactcagtggttaagagcactgactgctcttccagaggtcctgagttcaattcctagcaaccacatggtggctcacaaccatctgtaatgggatctgatgccatggtctacagagtgagtttcaggacagccagggtaattcagagaaactctgtctcgaaaaaagaaggaaggaaggaaggaaggaaggaaggaaggaaggaaggaaggagggaaggagggaaggagggagggaaggaaggaaggaaggaaggaaggagggagggagggnnnnnnnnnnnnnnnnnnnngaaggaaggaaggagggagggagggaaggaaggggaaggaagggagggaaaggaggaaggaaggaaagagagagagagagaaagaaagaaagaaagaagaaagaaagagaaaattgtattaaatggtaaattaaatgataagaagcacaatggaattgcaagttttctgttgacagaagggaatggtatactttgtgtagtaacctaaaacttgataaatgtgttgatatttccgtagtaatatgatggtttgccagctgagtagaacagagaaacaactactggtttcacagtgagtttaaaatactgggtaaagagagtcattcaatgcatcatatattagcaagagtcaggcatagtggtatgttaatcccaccagacaaaaatacgagcactatcaaaatttctgagccaaatttgaagcaagtttcattaagttctgaccagatcaatggacactggcccacaccctggattttcagacaatggcttcaaattatgttagtgaggttcttataaaggcaaaacccacagtgtgtgcttttgggacaagcatacatcctaatgtacgttgtgccaaggcacctcctacctctctgtggtgaaacattttgtgtgcagtttgtggaaacaaccttgtttacagaagtgagaatgcatggtttgttagcttacatgaacagcgttcagtattttaggaagttatctgtccttggacaagtggggtttataggttagaggcagttttgctttatagatctcttaagcatagtaattaatatttaaaacaacgttagccctcacaggtgttcttgagtgataaacagtatttgagagactgagacaggatagtatattttcatggccagtctgggctatataattaagacctgtttgaaacatgagtgaggattaagctagtatcaaaaaaaaaaaaaaaaaaaagtacattagatacttctactaaagaaaattaatggggcatgtttgcagtgacaccagacagcaaagactgacttgatagacacctcaagcctctagcatggaagagtggaggcaggctgatagtcatggcttcacgggccttgctagagcctttctcttcagagtatggggagttgtgaggtctatgggacatacagagaaggaagggggtaggttacatttccatgttagtgctcactctactgtcatctagagaatgactggcggcacacctgagttgatccagtgagagaatttcagtcatatagatgtgagagtgtgaacttggcctcaggagacagataatgataatggattcaagaatttaagaagcaaacagcttattccacagcagtttcagagtttaaatttcttttatgaaaataggtctttgattttttttttttttgtataaaaatgtgtagtttttaagcaactacttgtcattgcaaatagtcttgccttaaaatttttcagttgcctgactattctctctttccttgtagtgacaaagaacttaactgaaaaaaggtcagccaaatcatctgagatgtctcctgtaccattgaggtcagttggccaaacagctaaagtccacttgcatcagccacacagagtgagccaggtgcttcaggtgccagcagttaacttgcaccccatccggaagaaaggacaagccaaagaccatgtgctgagtgagtgctcataaccctcaagtcactttactctgaatttccaaaggtaattagctaagtgctagcaagagtaggatcacggcatcatgagtcaaaaaggtttggtttttgcttcaacatatttgatgacagcatgtttttaaatactagtggtgggatttctatactactaaaatctgttcatcaacagaatcttacacagccgtgcactgaatcaaatctacatcaagtcttaggtagcacatcaagcttacgtccattctgcattcaaagctgtatctcaaatacaggcctccagaagctgtgagaatcaaacggtttattgtgaaaaacacatatacactgcctttttcattaacgccccctccagaaaacctcattaggataaaagaacatgtaagatacacaagaatacagaactacagcaatggctcagtggttaagagcactgactgctcttccagagtgcctgggtttgattgcctgcatccacatgttagctcacaaccatctgtaactctagttccagaggatcctacatcctctcctggcctctatgaccactgcacacacgtggtatataggcacacacgcagtcaaaacacacataaacacacacacacatacattttattcactttacatctaaatctcagccttccatctctcctctcctctcagtaccacccttaaaaattcatccccctgccccattaccctcttctcagagaaggggaagccccccctccctcctttgggtatcacccaatcctgggacatccagtcgccatgggcgtaagcacgtcctctcccattaaggaccaaccaggcagtccagttaggggaaggagatctagtggccggcaactgagtcagagacaaccgccactccagttgttagggacaccacatgaaaaccaagctgcacatctacaaatgtgtagggggcctgggtccagcccctccgtattctttggttggtgttttagtctttgtgagcccccatgggcccaggctagttgactctgaaggtttccttgtgatgtccttgacccctccaactccctcaatcctatccccctctcttccacaagactcccatcaagctctgcctgatgtttggctgtgggtctcagcatctgtttccatcccctgtttgatgaagcctctcaggagacagttatagtaggtttctgcaagcatagcagagtatcattaatagtgtcgggttggctcccatgggtttcacgttatgccaattgttggttggctgttccctcaatctctgctcagtctttatccatgcacatcttataggtaggacaaattcaaggttgaaggttttgtgggtagattgatgtccctctcccttctctggaagtcccacctgactacaggagatggccacttcagtctctatatcccctgctgatagaagtctcagctagggtcagtcccatagactccctggaaattttttaattagaaataattaaatagaagggtagagatattgctcagtgattaaggaatactgctttcatgagagcccaagttagattcccagcacccacatcaggtggctcacaactgcctgcaacttgagttccagataattaactgtctttggcctccttgggcatcttattctcttgcagacacataataaaataagtctttgtggttggtttttggggtttttgttttgtttaagtaacaaggctagagagatggcacagcacttaatagcacttgttgctcttgcagggggatctaagtttggttcccagcacccgtataataactcacaaccatctgtgactccagttccaggggatcaaatgcctctctgacctctgtgggcatcaggcatacatgtggcacacatacatgcaggcaaaacatttatacacataaaataataaatctaaaaaagtttttaaacataaaataacataaatataatctatagctctgttttcccccttgagccatatagacatcattggaattacctttatttggtgttttaacagtatctctatttccgtttttatatgtgaagctagattaccttcgtttgctggtattattaacatggtccatgtattaatacatagtatatgcttagtagaagtatgtgattttaatttgatttgatgtgaaaatacagaattgaattttaaaaaatgaccagggtttcaatctagtgtcattatagacacagattacttctttattatgtgtgtgctaacacagtacattaaaagaaaaaaacaagagaagcctttaacaaagtcgggggtaatgtgtaaggagctacagatactttggttcactacaaactgcatgcatgttaagagacagtaactgaaagtcagggttttgggttttgacttggtagttaagtgcttgactagtgtactcaaagctcacccgactcccagcagcatgcatacacacccatgcatttgaagctcacatttaatactgagtttcagacacagtccatctttgttaactttatatatttacttggtcttcataatatcctatgaggtgagatgatagaatgagacagcctcattctacatggattcttagtaatgtgcacagtgccaggacataaccagtctggcaggtgatcctaagctggttggctctaaagtactgctttttaactaccagactaaacagcctcccaaggatatgagaagtatagtcataaatatgtccagattataaaggtgacaaccaaaatttgtcactgggaaaccactaaaaagatttgaaatcttacatgctgtacacccctctaattctagcacttgggagactgaaacagggggattgcacgttcagtgttaatccaggctacaagtttgagaccagcttgaattacatatctgttaagagagtgacagaaggagacaaggaaagagagatggaaggagaaagaggagggggagaaggtgggcggtggagccatacttgaacatgaggtggttgtgggaacgagtcgagcaaatccagatgcaggagagcccagctggtgtgagtcttttcagaagactgctgtgagtgtaccagctcgtcaccacggttgtccttgctccgggtagagagtaatctggagctcagtgacttcctagaagctatgtagtgagtgagtgacttcctagaagctatgtagtgagtgagtgacttcctagaagctatgtagtgagtgagtgacttcctagaagctatgtagtgagtgagtgacttcctagaagctatgtagtgagtgagtgacttcctagaagctatgtagtgagtgagtgacttcctagaagctatgtagtgagtgagtggcttcctagaagctatgtagtgagtgagtgacttcctagaagctatgtagtgagtgagtgacttcctagaagctatgtagtgagtgagtggcttcctaggagctatgtagtgagtgagtgacttcctagaagctatgtagtgagtgagtggcttcctagaagctatgtagtgagtgagtgacttcctagaagctatgtagtgagtgagtgacttcctaggagctatgtagtgagtgagtgggctgggactgtttctgaatctcacctatgctcagagctagttagtgaaggatagaacttcccaagaatggttttaggagtgccatataattttcctgtctgttgcttacttttgttctgtaataggaacttagtgctcttgaaaagggctggcctggcagcctcatgtgcacccacagcagagatgcaactcaggtggtgacagtacctgcaccccacataattgtgagggttaagataccataccacaaagcaaattgccttattaatctgggctgtgctggccatctgtgaggttgaacaagttacatagagatgaggcctgtatgatatttcccagacacttaagtcccaaactgcacttaaatgtcttgattgactataccagccactgtctttacttaatgatttagacaactacgtctgttttcattgtaaaatgtttctgatttgcttatttgtttgtttattcattttttaggtacaagtttacctcagaaaggtttaggaccaactgaggaagtgagtgttaagaaacacacagaagacactatttctgtagcgtcctctctgcactctagccctcctgcatctcctcagaactccccacgcaaaggtaagaaggaatgtttcccattaactcttctcagacctgataacacttcagcacagcttgctttcagtctgtaagcctgaaagatgaaaatgctaaggcctagtttttcaggtgttactaagtaactaggactccagtactcaagtcatgatccttggctgtttgaaagagggcaagcatgggtagaaatgagagcgtaaatcacagttgttttgctctgtgccagtgctcagtaccatccttccagtttcatataagtgagcatctctgtggaaaatttgcaaataaaattctataagaaattgtatttacactgggtgtgatggtgcacaccagcacttaggaagaggagtccagggggtcagggttgttattgactgcataaaaagttcaaggcctgaaacccagctcccaaaaaagcattttgttttgattttgttcaagtacaaagtataggaaaagaaataaatgctagctgcccatggagacataaccctttaatccctgcactcaggcagcagagttgggtagagctctgtgagttccaagacagccagggctacacagagaaaccctgtcttaaaaaacaaaaagaaagaaaaaaaaatatttagctttctccttctggtttcttctgtttttcttgtttatggggatttaaaataatctatgtcttggggcatttacatttatacaaaaccagaaaagaaaagatataactcctggttctttaaatgtgttttcatgagtcagactgaagattttcatggctaaagtgacttattgaggtgccacatgacactgagcacatgtcaggcatgctgaagagcatgcgtctcttactctgccttccacactctgcacttgtaatggagaagggccatcctaatcctgccttctgcatgagtgtaaaaagaaaaacactttataaagcacagtagaggaccttgcctggccaggggggagattaagtttggcagtcctgcctgtcactcattcccttcccaagagctaagtgtcactcttcagggctgtgccagctgcagcacagtcatattaacactggaggctgacactctgtcctttgtccccattcgtgacttgttcataaggtccagacaaaccctttgtcttagggtctgtgtatacagtttaacagaaatgttatttctatgtgtggtaagtgattagtacattcagatatccctttcctgctgagattttaataaggaatggttcatgaaaatcaaataggacatagaaggaatatgtatagtaggtatattcttaaaatagtttctgattctgctgcatctcatactttgtaagacacactatatgtctttgtatgtcttctctttgtctatatgagctgattatccagaataccttcgtcagatctctagaagcagcaaccaagcctgtagtgaggcaggtcgtcaaacctgcagggcctgagtttggaagctgtgcacagacagttgtgtaaggaagaagctgctagatctgattatagtttgtgtttactgtgtcttgggaagaaatataatggataaaaatatcccaagaaaaattcactctctttttttcttttctggaacctgctgtgttggccaggctgggattgagatccatcttcctctgcctcccaagtgctgggattaaaagtgtacaatgaccacaccagtctaaaaagctattcttacactggtgtaaattccctttactctgttgtctttcagtatgtggctgactgttgaccatgatgtttataaagagggcatcagatttcattatggatggttgtaagccaccatatggttgctgggatttgaactcaggacctttggaagagcatttggcgctcttaaccactgagccatctcaccagcccccagaaattattcttaaatatttcaagaccccatcaagacaaccaggcagagtgagtgatacatacctgcaatgccagcactcagccagctgaggcaggaggacctggcatacattctaggacatccttagaactgcataagacccttccaaaaagaaaagaaaaacccaacagcacctctatttccataaacagctgcatgccagtggcctgtgggtgaacaaaatttttgtagtacaagtccattattcatctgttctcaattcctattaaactttggaattgctgggcgtggtggcgcacgcctttaattccagcacttgggaggcagaggcaggcagatttctgagttcgaggccagcctggtctacagagtgagttccaggacagccagggctacacagagaaaccctgtctcggaaaaacaaaacaacaacaacaacaaaatttttttgaaaatagtgtttttctcatcaccaataaggtaaacctatttcatattttcataagaagaatttaaacaagaacttagaagccaagagatggggagccggctcagttaataatgcagctactatgcaagtacaaatacctaggttcccccctagcactatgtaaaatctcaggcatggtagcacagtcataattctgggactggggaggagagagacagatcacttgggccagtcagtgagctgctccttagggagagcaccacttagcttgtcttctggcctccagtggggcacctgcacacacacacacagacacacacacggagagcaccacttagcttgtcttctggcctccagtggggcacctgcacacacacacacagacacacacacggagcgcaccacttagcttgtcttctggcctccagtggggcacctgcacacacacacacagacacacacacggagagcaccacttagcttgtcttcttttatttttattagatattttcttcatttacatttcaaatactatcccctttcctagtttcctctccaaacgtcccctatacccttccccaccccctgctccctaacccacccactcctgcttcctggccctgtcttctaacctctactggggtcacgctcgcacactagaatgagtggtgcagggtaagccaaacaagctgaacatccctttgtcttggagccccacatgcaccagtgctttataaaggtgtccttagatcctgtgtgtgtcctatttggtttttactgagctttgtttacttaaaatctcctgaaagttctaaagcattattccttctaagggatggttcagatcaccagatgttgttgtaatatttgtctttataatctttaccagtatcgattgctttccacattttttgtcagcatgttctgagcaaggtaatgtctatcctcttgtcttgtagtaacagaggtgtttattatgtacaatagctatagctccatagtttcttaatttattttttaaaaaaaactgttactatagttcagttctttagatattgtcaagatgataaaattttaaaatagtgaaatgttatgtaagccaagctaattgtgactagttgaaaagaattaattgaccatgtcagggtttttgcatctctccctccagttggcagtatcctatctgatcacagcatcctgttgcgtctctcagggtcttcctcatcccctccccgtgagcccagcaccaagatcagtggccagagctgccccggaataggtggggtttacttgcaaaagaaaatccttcagattactgggagcacagccaaaagaacagacaggaccaagaaggccactgaggagaatagagacaggacaaggtgtgaggacactaccaggagaaggatgacatccccgtttagaagatttagggagagaacgctttcaagggagagactagtcaacaaccaaaaagaggatgcacatcacaatcaagctacagacagctgtgagaaagtgaaggatgttggaagcaacatcacagatgagagagggaatgccatctacgactcgagtagccaaggccacagtaccgcgctcagctgcttctgtacgcggttcaagactaaaaggagaaagactctctgaaaagtttcttatctaacattagtgttaaacttgttttaagttattcatgtaaatgtagctcgaactcagccatctgtcagacattgggcagacgatgtagtaagtactattaagcattttatgcgtactgtagatcctctaagaaatactgatttactgtgcctcacttgtacatatgttctctgaccgctgtgttgagttagtaaattttatccattgttttctgtactttgctgtattttcttctgatagcagctgagactgagtgaaatgatcaggaaagcttcttaagaagctgtttgccatcttactaccccagcaggttcagcatcatctggaaacttttaagtaaaattaccatgtcccacccagatctcataaatatgaatgggtgccagatgtgtgtgtgtgtaatttaataaatgttccaggcaactcttagtatcagttccctttgagaaattctggtgtaacaaacataaggatcaagtctattcagtacagtgaaaacgcagtggctctttttggaagtaggtggttaactggtttgatttttcatttgacacatttattgtcttggttttcttaaaaactgaataatcatttcatggcactgatatcactaacagtgagctcaaacacaaggccatgtggtaaaagtcagaaacactggcttgtctgtcttactgagttgttggcccataagcccaagggtaaatcacacatttctggatcttgatttttctgtaaaatgattggtggcatctctcaaaaatgatgcttcacagccattttttcttcagtgaatttagtcacacatgccaaaatcctgaaggcctaaggagacagtagcacttagctcgctgtcttattcgttgtgttactaaggatcaggaacatccaggggcctccatttcttctttagtggtgttttgagaatagatccaaaagtcatgtgacctgtcacccctcactctgccctgtgaaccggaaggcattggtgcttcttaaggacccaccttctgtggagctgctgcagcattttctcttacttctgaaacccaagtatgatgtcttgctgcagaccgctttgtccatttagccatcatcctgtagatgtggttttggatccttctccttactccatccctacccttttatccctccaaaacagacaggtctctgtaggcatgcagtgtgctcagctacttaattcttaacaaaattaatcatgtccaaatctaaaacagtttgtttaaagaaactgaaacagggctaggaagacctttaaatgtgggtacctgaatccctattccctgcatctaagtaaagatccattgtgcattatacaaccctagcatgggtcagtgagctagagatgagaggatacctgggccctctggctagccagctgatgagttacagattcagtgtcttaaaagaaaaataaggtagagaacaatcaaggaaaacatcttacatcagcctcggacttacacacatacccacacgaacatagacatataccagtaatttgcatgcacacaaaatcacctggagctctcactggtagagcctttgcccaacctgtgcaagaatacctgaattgtattcttagaatcaccacaaataattgattgaaatagtggtcttatgtttgggaaaagactatctgaggtaagtgaatgcactttgaagatttccaagtacagttctttgagcctgcgtgttgcttccttagggtgggccatgaaatatttcatgtcaaagaaggggatatagagttaaaatgaatgaggttgaaaactgaagtatgtgtacttgttaatgtttataacatatttattgttcttgttttactgaaaatttgagaaagtatgtgattctgggacagtaatactagattttgacgtttttctgcaatgtggagttctgtggatgtggttgtaggtggtgggtgaattggctatatggggaaaggaatggagaaattgccatccttacagcctcaggcatgcatcctggcattccctcctactttgggtttgtttgtttgttgtttgttttccttcattttttttcttggtctcacacggctgcccctgtttgtccccttttttgaagtttgatgggtgttctcttctcattcaggttatacactcacaccatcaagtaaatgtgacaacttgtctgactccagccacagtgaaatctcctctcggtccagcattgtgagcaatggttctgttgactccatgtctgcagctgggcaggatgaacgctgttcctcccacagtctggcagttcctgagcccacaggggcattggaaaagacagatcacccttccgggatctcagaccacagtcagcttgctcacgggtaaacatccatgtctgtgctcttgcctccaaaacagaaccagtatgcagcattgagagcctgccttgcaccctcccccagtagcttaggtctatggcatactgtgtaagagtgtgaggctacatgtatgccctttgtacatactgagtgtggaaattcatgctacttgagagatacacaggtttccttttttattgttttggtttggtttttgtttctttagacagagtttctctgtgtaccctggctgtcctcaaacttacagagatccgatcacctgcttctgcctctgcctcttgactgctgggattaaaggaatgtgctgcagctgccacctggtagataccctttttgtatgttcctgaactctctttattcaggttactttctgccatgtatctcgtcactcactaagaatcctgtgcacctgctgctgttactagtggtgtggctcctggagaaagatttcaccgtacagcagacttccaggccagcatgtctgtccagcacaatgcaagagctaggagagtagggccaggccttggtctgaattcccatgtttagccttttgacattgagactgttgttttcttaaagaaaaaaaaaattgacattcaagaaaagcacaattgagtctgtccctccttcaaaaaaaaggatgtcaaatgccaatttcaaatttcatcttgtacttttatttaaagtcagtcaggatttcttagaggaaacattgcctagctaaggattcaggtgtgtcctggggccatgtgctgaggagtctccagtataccaccagattactcattgctcatctgtttgtccccactttcaggtggatgctgtcaaagccgtgtcttatcaagggtgtagctgtctcatcttctctgagcagcgaagagatgtctcatgagcatgttgtgctggaagcagctgacagtgggcggggcagttggacttcctgttccagcagctcccatgacaacttccaaagccttcaaaatcaaaaaagctgggacttcctgaattcttacagacacatgcatttagatgaccctattgcagaagttgagcccactgactgtgagccctgtgcctgtcctaaaggctgctcaagaacttgtggccagtgcaaaggcagcctagagacgaaccagctgaggcagagttgggcctcctccagctcactctcggacacatgtgaaccaaactacgggacagttaagcggagggtgttggaaagtgcaccagcagaggcacctgatggcttggagcccagggataccactgaccctgtttataaaactgtcacttccagtacagacaagggcttgattggtaagtgcagggtttttgtatcactgatgttgaggcattatttgcccctccccctagaaagagatacggggctatctttaccagatttttttttttaagaatgggctatttatttatttatttatttatttatttatatgtaagtacagtgtagcttacttcaaacactccagaaaagggcatcagatctcgttacggatggttgtgagccaccatatggttgctgggatttgaactcatgacctttggaagagcagtcttccatgctcttacctgctgagccatctcaccagccttctttaccagatcttattctttctctgacgctatacttattttcttccttccacaatttattgctccaaaatttgtggcttctccggagctttgtttgttttgttctgttttgttttgttttgttttgttttgtttttctctgtcatgcatgtccttgtttttataaaacaaaaagggaattgacaataatattaacagaaaatatacttgctatcagatacacatggaacacacagacccacaggtagagcctcggcgatgccttttctaaagttccatgccattaggagtatgtgcagggaaaggaaagattgttgtattgatctctaagttgttgggtccacagttgctatgtatacatgacagaaacaacaggtcctcttacttttcaggcagagagacctgctaagatactgaaccaactctgacacagtaggtcttagccccgtgagtggaccctgtactcactctcagcaccacagagacagaaagagaccccaggcatttctgtggacctcaccaggtgtcagctgatgtgagggttgctgtctagtgagcttttgcagtatatttagtcatcaatttgtttattccctgaattaaatgagtactttcacataatatctctacttccctgttacatgaaataactatcaaatgtgctaatcttgtaatatcttggatttatttagaacttttcaggattctaggaatgtataagcacaggtccctctgagtgttaattttaatgtctttcacttcttggtgatatgggtaaatccttcttcatttttctcttctcttgacaacttttccactgtcatacttagtcatgtctgcttgtcctcagatgaaagcagaggcctattctgaccttgacattacattgaccttaagataccacaaagagttagttcatctacactaagaaggctcattgattgcattgaccttgacattacattacttttgagttttactggtagaagactaggaacccaaaggacaaagctcttgttgtgatggtgtgatgtgcgatgtagatgtgactccttaagtccattctgctcatgtgttggcagtgtcttagatgttctttgtataatcaacagatagttgaacgggcttcactcctttcttccttgttctgatactttttgaagcttagtccctttccaggggtttattatacactcagcaaaaagaaaagttatcattattctttttttttttttttttttttgttttttttgggggnnnnnnnnnnnnnnnnnnnnnnnnnnnnnnnnnnnnnnnnnnnnnnnnnnnnnnnnnnnnnnnnnnnnnnnnnnnnnnnnnnnnnnnnnnnnnnnnnnnnnnnnnnnnnnnnnnnnnnnnnnnnnnnnnnnnnnnnnnnnnnnnnnnnnnnnnnnnnnnnnnnnnnnnnnnnnnnnnnnnnnnnnnnnnnnnnnnnnnnnnnnnnnnnnnnnnnnnnnnnnnnnnnnnnnnnnnnnnnnnnnnnnnnnnnnnnnnnnnnnnnnnnnnnnnnnnnnnnnnnnnnnnnnnnnnnnnnnnnnnnnnnnnnnnnnnnnnnnnnnnnnnnnnnnnnnnnnnnnnnnnnnnnnnnnnnnnnnnnnnnnnnnnnnnnnnnnnnnnnnnnnnnnnnnnnnnnnnaccctagccaagggtggcagcataagcctttaatatcaacaccaggagtcagaggcagacctctgagagccacggctgtgtagagatccttcctcaaaataaaaataacataccacaaagagttagttcatctacactcggaaggctcattgattgcatgcctggactgggatgtgtccacgctgagccacccgaagacggtctgcgaacatgtgccagtgctgtgactcagagccaacaggaagtgagtttgtgactggttgtcttcaggagtgagggcttcattgagctgttgggtgcaagggctgtgcctggggagagatgtcctgtcactgtcctctggcttcatgtagctgtctatgtgtagagttttcttaaaatatctgataggtttaaatattagtgtttgtaagaacatttttagtttactatcattgtatttaagtgtattcattttgtctgtttttaagttatatttttgccattgtgatgttcagtgtggggttttctttcctttgtttatgtttttccattaacatttccactgcttattttttcacaccagtgtactgtgtcacctcacccaagaaaggtgataggtatagggagccaccgcccactcctccaggatatctgggaatttctttagcggacctaaaggaaggaccccacccgcacctaaaacctccagactatagtgtggcagtacagagatcaaagatgatgcttaacagcctgtctagactgccgccagctcctcccagtagccacacctcggcctgggttccctcgaagattggatcccagcctcaaaggcatagccatcccaagctagcagatgtggctgatgcagatagcgaagcagatggtacgttgacaaactgtctcaatggctcttaagtggattgtggagcatagaagggttttttctctggtatctgtgataatctgtaatgttttttaatctctttaaatttgtttttttttaaactgagatctaagaatatagctcagtgagaaagtggctgacacaaatgaggtcccagggtcagtctccagcactactaagaaaataaatgtatttattattctattgaacccatcaagagcacttgtgcaaacctggcagcctacgttctggcccacaaacccacacaaggagaaaccaacaacaaaaagtactccctggcctccccacacacacactgtacacacatgcacacacaaacactgtgcacacacgcacaaacacacacacaaacactgtacacacacgcacacacaaacacacacacactgtacacacacgcacacagaatcaggctgctgtctctgtgcccactgctctgatgccagctcaaatggagtatcattatctttgataatgaaacagtaggagtttcccgtaggagagttctgagagaagacactttatgtctgttgagtaaagttttacaaaagacagttgtctaaaagacactcttgacttagttcctctgaggaacaaaactcttaatgaactttgtaactgtagcaaaagtttaaaaggtagtgtctaacgctaaaaataaatattttatccttctaaacagtttagtagtaaaatgatacattaaaaccatctgggaagatggctctgaagatcagaattcagagtcccgtgtaaaaactggccaaaatcccagcagagacaggatccccagagcaagctggctatgtaaactactcagatcaacaagctccagaacaccagacgatcctgtctgggtatagggagtaagtaaaatagagagtgatccatccattaagacatcagatgccaaactccatccatgtgtctccatacacatgcacacacacatctatacacacatatactcacacatgcacacaaacacctatacacacggatgtactcacacacatgaacacacacccacacacacatactcagtatatacatgtgtacctgtacacatgcacacgcacatacacacacacacaccaaaaaaatgaaactacagggaccagcaagatggctcaggagataaagcctgatgacctgaattttatccccagaaaaagagaagcaattctgcaaattgtcctatgacacttcacacgtgcacagtggcatttatgtacacacatacacacacaaacacaaaataagtgtgaaagaattttttaaatttgaaatttccagttttctattagccctcagtgttacagtcaaacctgagccttgatggggatgtctaccaagatttgtttagatagagaaagcttcttatgtagcagataatctgtctgttattgtttgacctgcattagcagatagatgtgctggctaattgtgtcttcattattttcagaaaacgagcaggtgtcagcagtctagcctttggacagagtgttggagagcactggaagtcaggaccatggacaagagctcgtggttctgtaggccaaggccatcagctcgctgctgccactcatgctgagggttccacactgggctctgaggatgagctcttctgagtcgtgcttccttttgttctgtccctgcaggtgcagtttccttacctgggtgttgcacctgatctcagcctatactttgcacatcactcctgccttgggaccacattcaagctcagagttctccccctgtatatcactatgagtttttcttttcgagagtcattttaaagatagtggtattattattatttccaagccatagcttgggctaaaaggacacattcagaatgtctgccaataccaaggatagtcttgtgtatttgaaaagtaacttattattgcaagtattgtgattttgtttgcattcaaaagctcttgttagctgttatttgtcttagtctataaagctgtctgtgtgtggtctgagcagcagttgtcatcccaacacaggtacggagatgtgacagcattgtagcagacactcaggtgggaacaagacacccgtgcaggtgcagtgcaggtggccagctcatcatgatgtgggctacagcagccacaggggtctcagcagtctttcggaaaggagaacaaagcgcaagtaggaagaaagaactctaatttccaaagaaggaaagattaacattgaacttgtttctgaaatgaacatcatgttgcacccaattgtgaggatactacaaacccactggcagtggcttctcaaaggctttctttctatagaaaccctaagctaccatttcacaacacaagtatggaatccctagattaaaagaaatattgtaggagctggagagatggcgaagatactcttgcagagggctggatttaatttcagccctcacatggtggcttacaactgcctgcaactccacatccaggggatccgacaccctcgtctgacctccacaggcacttcatgcatgtggcccataggcatacatgcagtcagaatacccctacacacac

SEQ ID NO: 230 - DNA, 5837 bp, Mus musculus
gcactgaggaagaagccgcccgagcggactcctgaggacttaaatattatttattcttatctgcatgggatggaaatactatcaaacctcagggagcatcagcttaggttaatgtctacaagagcacgctatgagagatacagtggcaatcaaatgcttttttgttcagaaactattgccagatgttggtatatcctgctttctggatctgtacttgtaaaagattctatggtccttcctccttgcagttttggtaagcagtttggaggaaaaagaggatgtgattgtcttgtgttagaaccttcagaaatgattgtggtagagaattccaaagataatgaagacagtattttacaaagagaaattcctgccagacagtctcgacgaaggtttcggaaaattaactataaaggagaacgccaaaccataatagatggagtggatattaataactacctttcgcttccagctgatcttaccaagatgcacctcacagacaaccctcatccacaggtgacgcatgtgtcttctagtcagtctggctgtagcattgccagtgactctgggagcagcagtttatccgatatctatcaggctacagagagtgaagtaggagatgtagatttaacacgccttccagaaggacctgttgattctgaggatgaagaggaggaggaagaagagattgatagaacagatccactgcagggtcgagatcttgttcgggagtgtcttgaaaaggaacccgcagacaaaactgatgatgatgttgaacagttacttgagttcatgcaccagctgcctgcctttgcgaacatgaccatgtctgtaaggagagaactctgctccgtcatggtttttgaagtagtagagcaggctggggctgttattcttgaagatgggcaagagcttgactcatggtatgtcattttaaatggcactgtagaaattagtcatccagatgggaaaatagaaaatctcttcatgggaaatagttttgggattgtccccacgctggataagcagcacatgcatggagctgtcaggaccaaagtcgatgattgtcagtttgtctgcatagctcaacaagactattggagaattttaaatcatgtggaaaaaaatactcacaaagttgaggaagagggagagattgtcatggtacatgagcaccgtgagctagaccggagcggaaccaggaaaggacacattgtaatcaaggcaacacctgagcgtctcatcatgcatttgatagaagaacattctattgtggacccaacatacatagaagatttcctcttaacttacaggacatttcttgaaactcctttggatgttgggatcaagcttttggaatggtttaagattgacaacctaagggataaggtgacacggattgtactcttatgggtaaataatcattttaatgattttgaaggtgatcctgctatgactcaatttctagaagaatttgaaagaaatttggaagatacaaaaatgaatggtcacctcaggttattgaatattgcctgtgctgcaaaggctaagtggaggcaagttgtactgcagaaggcgtcccgtgagtccccgctgcacttctgccttactgggggcagtgagaagggatttggagtctttgttgaagaagtagaatctggtagcaaagctgctgacgcaggactgaaaaggggtgatcaggtaatggaagtcaatggacaaaactttgagaatattacacttgctaaagcccttgaaattttgagaaataatactcatcttgcacttactgtgaagaccaacatttttgtgttcaaagaattgctcagtaggactgaacaagagaaatctggtgttcctcatattcccaaaattgctgaaaaaaaaagtaatcgccattcaattcaagatgtcccaggggatatggagcaggcaccacaggagaaaggaaataagaaaattaaagcaaataccgtttcaggtggaagaaacaaaatcaggaaaattttggataaaacacgatttagtatcttgcctccaaaactatttagtgacggaggcctgagtcaatcacaagatgacagcattgtgggaaccaggcactgtaggcacagcctggctataatgccaattcccggaacactttcatccagcagcccagatctcttacagcctaccactagcatgttggacttttccaatccttcagatattcctgatcaagttataagagttttcaaagcagatcaacaaagttgctacattatcatcagtaaggataccacagctaaagaagtggtctgccaagctgtacaggaattcggtttgactggtgcatctgacacatactccctctgtgaagtgtctgttactcctgagggtgttataaagcagagaagacttccggaccagttctccaaattagctgatagaattcaactcaatggaaggtattacctaaaaaacaacatggaaacagaaacattgtgttctgatgaagatgctcaggaactacttaaggaaagccagctctccatgctgcagctcagtaccatcgaggtcgccacccagctctccatgagagactttgatttatttcgtaacattgagcctactgaatacattgatgatctttttaaattagattccaaaacaggaaatactcacttgaaacaatttgaggatattgtaaaccaagagacattctgggttgcctcagagattttaagtgagtcaaatcagctgaaaagaatgaagattattaaacattttatcaaaattgctcttcattgccgagaatgcaagaatttcaattccatgtttgcaataataagtggcttgaacctggcaccggtagcacgactcagaggcacttgggaaaagttgccaagcaaatatgagaaacatcttcaagatctacaagacctttttgatccatctagaaatatggcaaaatacagaaatattcttagtagtcaaagcatgcagcctccaattattccactcttccctgttgtcaagaaagatatgacatttctccatgaaggaaatgactccaaagtagatggcttagtaaacttcgagaagctaagaatgattgccaaggaaatccgtcatattattcgaatgacttctgccaacatggaccctgccatgatgttccgacagaggtcattgagtcaaggcagcacaaattctaacatgctagatgtccagggaggtgctcacaaaaaaagagcacgccgcagctcactgctgaatgccaagaaactgtatgaagatgcccaaatggcaaggaaagtgaaacagtatctttctagtctggacatagacacagatgaggagaagttccagatgatgtcactgcagtgggaacctgcatatggtaccttgacaaagaacttaactgaaaaaaggtcagccaaatcatctgagatgtctcctgtaccattgaggtcagttggccaaacagctaaagtccacttgcatcagccacacagagtgagccaggtgcttcaggtgccagcagttaacttgcaccccatccggaagaaaggacaagccaaagaccatgtgctgagtacaagtttacctcagaaaggtttaggaccaactgaggaagtgagtgttaagaaacacacagaagacactatttctgtagcgtcctctctgcactctagccctcctgcatctcctcagaactccccacgcaaaggttatacactcacaccatcaagtaaatgtgacaacttgtctgactccagccacagtgaaatctcctctcggtccagcattgtgagcaatggttctgttgactccatgtctgcagctgggcaggatgaacgctgttcctcccacagtctggcagttcctgagcccacaggggcattggaaaagacagatcacccttccgggatctcagaccacagtcagcttgctcacgggtggatgctgtcaaagccgtgtcttatcaagggtgtagctgtctcatcttctctgagcagcgaagagatgtctcatgagcatgttgtgctggaagcagctgacagtgggcggggcagttggacttcctgttccagcagctcccatgacaacttccaaagccttcaaaatcaaaaaagctgggacttcctgaattcttacagacacatgcatttagatgaccctattgcagaagttgagcccactgactgtgagccctgtgcctgtcctaaaggctgctcaagaacttgtggccagtgcaaaggcagcctagagacgaaccagctgaggcagagttgggcctcctccagctcactctcggacacatgtgaaccaaactacgggacagttaagcggagggtgttggaaagtgcaccagcagaggcacctgatggcttggagcccagggataccactgaccctgtttataaaactgtcacttccagtacagacaagggcttgattgtgtactgtgtcacctcacccaagaaaggtgataggtatagggagccaccgcccactcctccaggatatctgggaatttctttagcggacctaaaggaaggaccccacccgcacctaaaacctccagactatagtgtggcagtacagagatcaaagatgatgcttaacagcctgtctagactgccgccagctcctcccagtagccacacctcggcctgggttccctcgaagattggatcccagcctcaaaggcatagccatcccaagctagcagatgtggctgatgcagatagcgaagcagatgaaaacgagcaggtgtcagcagtctagcctttggacagagtgttggagagcactggaagtcaggaccatggacaagagctcgtggttctgtaggccaaggccatcagctcgctgctgccactcatgctgagggttccacactgggctctgaggatgagctcttctgagtcgtgcttccttttgttctgtccctgcaggtgcagtttccttacctgggtgttgcacctgatctcagcctatactttgcacatcactcctgccttgggaccacattcaagctcagagttctccccctgtatatcactatgagtttttcttttcgagagtcattttaaagatagtggtattattattatttccaagccatagcttgggctaaaaggacacattcagaatgtctgccaataccaaggatagtcttgtgtatttgaaaagtaacttattattgcaagtattgtgattttgtttgcattcaaaagctcttgttagctgttatttgtcttagtctataaagctgtctgtgtgtggtctgagcagcagttgtcatcccaacacaggtacggagatgtgacagcattgtagcagacactcaggtgggaacaagacacccgtgcaggtgcagtgcaggtggccagctcatcatgatgtgggctacagcagccacaggggtctcagcagtctttcggaaaggagaacaaagcgcaagtaggaagaaagaactctaatttccaaagaaggaaagattaacattgaacttgtttctgaaatgaacatcatgttgcacccaattgtgaggatactacaaacccactggcagtggcttctcaaaggctttctttctatagaaaccctaagctaccatttcacaacacaagtatggaatccctagattaaaagaaatattgtaggagctggagagatggcgaagatactcttgcagagggctggatttaatttcagccctcacatggtggcttacaactgcctgcaactccacatccaggggatccgacaccctcgtctgacctccacaggcacttcatgcatgtggcccataggcatacatgcagtcagaatacccctacacacac

SEQ ID NO: 231 - protein, 1557 aa, Mus musculus
MEILSNLREHQLRLMSTRARYERYSGNQMLFCSETIARCWYILLSGSVLVKDSMVLPPCSFGKQFGGKRGCDCLVLEPSEMIVVENSKDNEDSILQREIPARQSRRRFRKINYKGERQTIIDGVDINNYLSLPADLTKMHLTDNPHPQVTHVSSSQSGCSIASDSGSSSLSDIYQATESEVGDVDLTRLPEGPVDSEDEEEEEEEIDRTDPLQGRDLVRECLEKEPADKTDDDVEQLLEFMHQLPAFANMTMSVRRELCSVMVFEVVEQAGAVIDGQELDSWYVILNGTVEISHPDGKIENLFMGNSFGIVPTLDKQHMHGAVRTKVDDCQFVCIAQQDYWRILNHVEKNTHKVEEEGEIVMVHEHRELDRSGTRKGHIVIKATPERLIMHLIEEHSIVDPTYIEDFLLYTFLETPLDVGIKLLEWFKIDNLRDKVTRIVLLWVNNHFNDFEGDPAMTQFLEEFERNLEDTKMNGHLRLLNIACAAKAKWRQVVLQKASRESPLHFCLTGGSEKGFGVFVEEVESGSKAADAGLKRGDQVMEVNGQNFENITLAKALEILRNNTHLALTVKTNIFVFKELLSRTEQEKSGVPHIPKIAEKKSNRHSIQDVPGDMEQAPQEKGNKKIKANTVSGGRNKIRKILDKTRFSILPPKLFSDGGLSQSQDDSIVGTRHCRHSLAIMPIPGTLSSSSPDLLQPTTSMLDFSNPSDIPDQVIRVFKADQQSCYIIISKDTTAKEVVCQAVQEFGLTGASDTYSLCEVSVTPEGVIKQRRLPDQFSKLADRIQLNGRYYLKNNMETLCSDEDAQELLKESQLSMLQLSTIEVATQLSMRDFDLFRNIEPTEYIDDLFKLDSKTGNTHLKQFEDIVNQETFWVASEILSESNQLKRMKIIKHFIKIALHCRECKNFNSMFAIISQLAPVARLRGTWEKLPSKYEKHLQDLQDLFDPSRNMAKYRNILSSQSMQPPIIPLFPVVKKDMTFLHEGNDSKVDGLVNFEKLRMIAKEIRHIIRMTSANMDPAMMFRQRSLSQGSTNSNMLDVQGGAHKKRARRSSLLNAKKLYEDAQMARKVKQYLSSLDIDTDEEKFQMMSLQWEPAYGTLTKNLTEKRSAKSSEMSPVPLRSVGQTAKVHLHQPHRVSQVLQVPAVNLHPIRKKGQAKDHVLSTSLPQKGLGPTEEVSVKKHTEDTISVASSLHSSPPDQNSPRKGYTLTPSSKCDNLSDSSHSEISSRSSIVSNGSVDSMSAAGQDERCSSHSLAVPEPTGALEKTDHPSGISDHSQLAHGWMLSKPCLIKGVAVSSSLSSEEMSHEHVVLEAADSGRGSWTSCSSSSHDNFQSLQNQKSWDFLNSYRHMHLDDPIAEVEPTDCEPCACPKGCSRTCGQCKGSLETNQLRQSWASSSSLSDTCEPNYGTVKRRVLESAPAEAPDGLEPRDTTDPVYKTVTSSTDKGLIVYCVTSPKKGDRYREPPPTPPGYLGISLADLKEGPHPHLKPPDYSVAVQRSKMMLNSLSRLPPAPPSSHTSAWVPSKIGSQPQRHSHPKLADVADADSEADENEQVSAV

SEQ ID NO: 232 - DNA, 5097 bp, Mus musculus
agtcgcgcgtgggctgaggccctgggcgggcgttgcgaagacttgtttgcttgagtttggaccctgcgacagttctcatttccctcccggtggggctggcgtacacccggagctggagaatgggcagctagacgcaggctagggagcctgtggctgcggacatgaactcgcccgtggaccccggcgctcggcaggcactgaggaagaagccgcccgagcggactcctgaggacttaaatattatttattcttatctgcatgggatggaaatactatcaaacctcagggagcatcagcttaggttaatgtctacaagagcacgctatgagagatacagtggcaatcaaatgcttttttgttcagaaactattgccagatgttggtatatcctgctttctggatctgtacttgtaaaagattctatggtccttcctccttgcagttttggtaagcagtttggaggaaaaagaggatgtgattgtcttgtgttagaaccttcagaaatgattgtggtagagaattccaaagataatgaagacagtattttacaaagagaaattcctgccagacagtctcgacgaaggtttcggaaaattaactataaaggagaacgccaaaccataatagatggagtggatattaataactacctttcgcttccagctgatcttaccaagatgcacctcacagacaaccctcatccacaggtgacgcatgtgtcttctagtcagtctggctgtagcattgccagtgactctgggagcagcagtttatccgatatctatcaggctacagagagtgaagtaggagatgtagatttaacacgccttccagaaggacctgttgattctgaggatgaagaggaggaggaagaagagattgatagaacagatccactgcagggtcgagatcttgttcgggagtgtcttgaaaaggaacccgcagacaaaactgatgatgatgttgaacagttacttgagttcatgcaccagctgcctgcctttgcgaacatgaccatgtctgtaaggagagaactctgctccgtcatggtttttgaagtagtagagcaggctggggctgttattcttgaagatgggcaagagcttgactcatggtatgtcattttaaatggcactgtagaaattagtcatccagatgggaaaatagaaaatctcttcatgggaaatagttttgggattgtccccacgctggataagcagcacatgcatggagctgtcaggaccaaagtcgatgattgtcagtttgtctgcatagctcaacaagactattggagaattttaaatcatgtggaaaaaaatactcacaaagttgaggaagagggagagattgtcatggtacatgagcaccgtgagctagaccggagcggaaccaggaaaggacacattgtaatcaaggcaacacctgagcgtctcatcatgcatttgatagaagaacattctattgtggacccaacatacatagaagatttcctcttaacttacaggacatttcttgaaactcctttggatgttgggatcaagcttttggaatggtttaagattgacaacctaagggataaggtgacacggattgtactcttatgggtaaataatcattttaatgattttgaaggtgatcctgctatgactcaatttctagaagaatttgaaagaaatttggaagatacaaaaatgaatggtcacctcaggttattgaatattgcctgtgctgcaaaggctaagtggaggcaagttgtactgcagaaggcgtcccgtgagtccccgctgcacttctgccttactgggggcagtgagaagggatttggagtctttgttgaagaagtagaatctggtagcaaagctgctgacgcaggactgaaaaggggtgatcaggtaatggaagtcaatggacaaaactttgagaatattacacttgctaaagcccttgaaattttgagaaataatactcatcttgcacttactgtgaagaccaacatttttgtgttcaaagaattgctcagtaggactgaacaagagaaatctggtgttcctcatattcccaaaattgctgaaaaaaaaagtaatcgccattcaattcaagatgtcccaggggatatggagcaggcaccacaggagaaaggaaataagaaaattaaagcaaataccgtttcaggtggaagaaacaaaatcaggaaaattttggataaaacacgatttagtatcttgcctccaaaactatttagtgacggaggcctgagtcaatcacaagatgacagcattgtgggaaccaggcactgtaggcacagcctggctataatgccaattcccggaacactttcatccagcagcccagatctcttacagcctaccactagcatgttggacttttccaatccttcagatattcctgatcaagttataagagttttcaaagcagatcaacaaagttgctacattatcatcagtaaggataccacagctaaagaagtggtctgccaagctgtacaggaattcggtttgactggtgcatctgacacatactccctctgtgaagtgtctgttactcctgagggtgttataaagcagagaagacttccggaccagttctccaaattagctgatagaattcaactcaatggaaggtattacctaaaaaacaacatggaaacagaaacattgtgttctgatgaagatgctcaggaactacttaaggaaagccagctctccatgctgcagctcagtaccatcgaggtcgccacccagctctccatgagagactttgatttatttcgtaacattgagcctactgaatacattgatgatctttttaaattagattccaaaacaggaaatactcacttgaaacaatttgaggatattgtaaaccaagagacattctgggttgcctcagagattttaagtgagtcaaatcagctgaaaagaatgaagattattaaacattttatcaaaattgctcttcattgccgagaatgcaagaatttcaattccatgtttgcaataataagtggcttgaacctggcaccggtagcacgactcagaggcacttgggaaaagttgccaagcaaatatgagaaacatcttcaagatctacaagacctttttgatccatctagaaatatggcaaaatacagaaatattcttagtagtcaaagcatgcagcctccaattattccactcttccctgttgtcaagaaagatatgacatttctccatgaaggaaatgactccaaagtagatggcttagtaaacttcgagaagctaagaatgattgccaaggaaatccgtcatattattcgaatgacttctgccaacatggaccctgccatgatgttccgacagaggtcattgagtcaaggcagcacaaattctaacatgctagatgtccagggaggtgctcacaaaaaaagagcacgccgcagctcactgctgaatgccaagaaactgtatgaagatgcccaaatggcaaggaaagtgaaacagtatctttctagtctggacatagacacagatgaggagaagttccagatgatgtcactgcagtgggaacctgcatatggtaccttgacaaagaacttaactgaaaaaaggtcagccaaatcatctgagatgtctcctgtaccattgaggtcagttggccaaacagctaaagtccacttgcatcagccacacagagtgagccaggtgcttcaggtgccagcagttaacttgcaccccatccggaagaaaggacaagccaaagaccatgtgctgagtacaagtttacctcagaaaggtttaggaccaactgaggaagtgagtgttaagaaacacacagaagacactatttctgtagcgtcctctctgcactctagccctcctgcatctcctcagaactccccacgcaaaggttatacactcacaccatcaagtaaatgtgacaacttgtctgactccagccacagtgaaatctcctctcggtccagcattgtgagcaatggttctgttgactccatgtctgcagctgggcaggatgaacgctgttcctcccacagtctggcagttcctgagcccacaggggcattggaaaagacagatcacccttccgggatctcagaccacagtcagcttgctcacgggtggatgctgtcaaagccgtgtcttatcaagggtgtagctgtctcatcttctctgagcagcgaagagatgtctcatgagcatgttgtgctggaagcagctgacagtgggcggggcagttggacttcctgttccagcagctcccatgacaacttccaaagccttcaaaatcaaaaaagctgggacttcctgaattcttacagacacatgcatttagatgaccctattgcagaagttgagcccactgactgtgagccctgtgcctgtcctaaaggctgctcaagaacttgtggccagtgcaaaggcagcctagagacgaaccagctgaggcagagttgggcctcctccagctcactctcggacacatgtgaaccaaactacgggacagttaagcggagggtgttggaaagtgcaccagcagaggcacctgatggcttggagcccagggataccactgaccctgtttataaaactgtcacttccagtacagacaagggcttgattgtgtactgtgtcacctcacccaagaaaggtgataggtatagggagccaccgcccactcctccaggatatctgggaatttctttagcggacctaaaggaaggaccccacccgcacctaaaacctccagactatagtgtggcagtacagagatcaaagatgatgcttaacagcctgtctagactgccgccagctcctcccagtagccacacctcggcctgggttccctcgaagattggatcccagcctcaaaggcatagccatcccaagctagcagatgtggctgatgcagatagcgaagcagatgtggtattattattatttccaagccatagcttgggctaaaaggacacattcagaatgtctgccaataccaaggatagtcttgtgtatttgaaaagtaacttattattgcaagtattgtgattttgtttgcattcaaaagctcttgttagctgttatt

SEQ ID NO: 233 - protein, 1561 aa, Mus musculus
MEILSNLREHQLRLMSTRARYERYSGNQMLFCSETIARCWYILLSGSVLVKDSMVLPPCSFGKQFGGKRGCDCLVLEPSEMIVVENSKDNEDSILQREIPARQSRRRFRKINYKGERQTIIDGVDINNYLSLPADLTKMHLTDNPHPQVTHVSSSQSGCSIASDSGSSSLSDIYQATESEVGDVDLTRLPEGPVDSEDEEEEEEEIDRTDPLQGRDLVRECLEKEPADKTDDDVEQLLEFMHQLPAFANMTMSVRRELCSVMVFEVVEQAGAVIDGQELDSWYVILNGTVEISHPDGKIENLFMGNSFGIVPTLDKQHMHGAVRTKVDDCQFVCIAQQDYWRILNHVEKNTHKVEEEGEIVMVHEHRELDRSGTRKGHIVIKATPERLIMHLIEEHSIVDPTYIEDFLLYTFLETPLDVGIKLLEWFKIDNLRDKVTRIVLLWVNNHFNDFEGDPAMTQFLEEFERNLEDTKMNGHLRLLNIACAAKAKWRQVVLQKASRESPLHFCLTGGSEKGFGVFVEEVESGSKAADAGLKRGDQVMEVNGQNFENITLAKALEILRNNTHLALTVKTNIFVFKELLSRTEQEKSGVPHIPKIAEKKSNRHSIQDVPGDMEQAPQEKGNKKIKANTVSGGRNKIRKILDKTRFSILPPKLFSDGGLSQSQDDSIVGTRHCRHSLAIMPIPGTLSSSSPDLLQPTTSMLDFSNPSDIPDQVIRVFKADQQSCYIIISKDTTAKEVVCQAVQEFGLTGASDTYSLCEVSVTPEGVIKQRRLPDQFSKLADRIQLNGRYYLKNNMETLCSDEDAQELLKESQLSMLQLSTIEVATQLSMRDFDLFRNIEPTEYIDDLFKLDSKTGNTHLKQFEDIVNQETFWVASEILSESNQLKRMKIIKHFIKIALHCRECKNFNSMFAIISQLAPVARLRGTWEKLPSKYEKHLQDLQDLFDPSRNMAKYRNILSSQSMQPPIIPLFPVVKKDMTFLHEGNDSKVDGLVNFEKLRMIAKEIRHIIRMTSANMDPAMMFRQRSLSQGSTNSNMLDVQGGAHKKRARRSSLLNAKKLYEDAQMARKVKQYLSSLDIDTDEEKFQMMSLQWEPAYGTLTKNLTEKRSAKSSEMSPVPLRSVGQTAKVHLHQPHRVSQVLQVPAVNLHPIRKKGQAKDHVLSTSLPQKGLGPTEEVSVKKHTEDTISVASSLHSSPPDQNSPRKGYTLTPSSKCDNLSDSSHSEISSRSSIVSNGSVDSMSAAGQDERCSSHSLAVPEPTGALEKTDHPSGISDHSQLAHGWMLSKPCLIKGVAVSSSLSSEEMSHEHVVLEAADSGRGSWTSCSSSSHDNFQSLQNQKSWDFLNSYRHMHLDDPIAEVEPTDCEPCACPKGCSRTCGQCKGSLETNQLRQSWASSSSLSDTCEPNYGTVKRRVLESAPAEAPDGLEPRDTTDPVYKTVTSSTDKGLIVYCVTSPKKGDRYREPPPTPPGYLGISLADLKEGPHPHLKPPDYSVAVQRSKMMLNSLSRLPPAPPSSHTSAWVPSKIGSQPQRHSHPKLADVADADSEADVVLLLFPSHSLG
